(19) United States
(12) Patent Application Publication
(10) Pub. No.: US 2023/0332104 A1
(43) Pub. Date: Oct. 19, 2023

(54) ZBTB32 INHIBITORS AND USES THEREOF

(71) Applicant: NOVARTIS AG, Basel (CH)

(72) Inventors: Maria ESTEVEZ SILVA, Cambridge, MA (US); Ye GAN, Cambridge, MA (US); Yufei XU, Cambridge, MA (US); Elena ORLANDO, Somerville, MA (US)

(21) Appl. No.: 18/009,568

(22) PCT Filed: Jun. 11, 2021
(86) PCT No.: PCT/US2021/037048

§ 371 Date: Dec. 9, 2022

Related U.S. Application Data
(60) Provisional application No. 63/037,826, filed on Jun. 11, 2020.

(51) Int. Cl. C12N 5/0783; C12N 9/22; C12N 15/113; C07K 16/40; A61P 37/04

(52) U.S. Cl. CPC C12N 5/0636; C12N 9/22; C12N 15/113; C07K 16/40; A61P 37/04; C12N 2310/20; C12N 2310/11; C07K 2317/569; C12N 2501/515

(57) ABSTRACT

The disclosure provides compositions and methods for treating diseases such as cancer. The disclosure also relates to methods of making improved CART cell therapies, e.g., with reduced expression and/or a reduced biological activity of ZBTB32. The disclosure further provides ZBTB32 inhibitors, and methods of using the same alone or in combination with CART cell therapies.

### RELATED APPLICATIONS

[0001] This application is a U.S. National Phase Application under 35 U.S.C. § 371 of International Application No. PCT/US2021/037048, filed Jun. 11, 2021, which claims priority to U.S. Provisional Application No. 63/037,826, filed on Jun. 11, 2020, the entire contents of each of which are hereby incorporated by reference.

### SEQUENCE LISTING

[0002] The instant application contains a Sequence Listing which has been submitted electronically in ASCII format and is hereby incorporated by reference in its entirety. Said ASCII copy, created on Apr. 13, 2023, is named N2067-7174US_SL.txt and is 1,388,395 bytes in size.

### FIELD OF THE DISCLOSURE

[0003] The present disclosure relates generally to ZBTB32 inhibitors and their uses for treating cancer.

### BACKGROUND

[0004] Recent developments using chimeric antigen receptor (CAR) modified T cell (CART) therapy, which relies on redirecting T cells to a suitable cell-surface molecule on cancer cells, show promising results in harnessing the power of the immune system to treat cancers (see, e.g., Sadelain et al., Cancer Discovery 3:388-398 (2013)). Given the ongoing need for improved strategies for targeting diseases such as cancer, new compositions and methods for treating cancer, including improving CART therapies, are highly desirable.

### SUMMARY

[0005] Provided herein, inter alia, are CAR-expressing cells having reduced expression and/or a reduced biological activity of ZBTB32, methods of making the CAR-expressing cells and methods of using the CAR-expressing cells for treating a subject having a disease or disorder described herein. Also disclosed herein are nucleic acids, vectors, and compositions comprising CAR-expressing cells having reduced expression and/or a reduced biological activity of ZBTB32. In addition, the disclosure provides, inter alia, methods of treating cancer, methods of increasing the efficacy of other therapeutic agents or modalities, and methods of increasing immune responses, using ZBTB32 inhibitors.

CAR-Expressing Cells with Reduced ZBTB32 and Methods Relating Thereto

[0006] In an aspect, provided herein is a cell (e.g., a population of cells), e.g., an immune effector cell, expressing a chimeric antigen receptor (CAR), wherein the CAR comprises an antigen-binding domain, a transmembrane domain, and an intracellular signaling domain, and wherein the cell has reduced expression and/or a reduced biological activity of ZBTB32.

[0007] In an embodiment, the cell has no detectable expression and/or biological activity of ZBTB32.

[0008] In an embodiment, the cell comprises a ZBTB32 inhibitor, or the cell has been contacted with, or is being contacted with, a ZBTB32 inhibitor.

[0009] In an embodiment, the ZBTB32 inhibitor comprises a small molecule.

[0010] In an embodiment, the ZBTB32 inhibitor comprises: (1) a gene editing system targeting the ZBTB32 gene or one or more components thereof; (2) a nucleic acid encoding one or more components of the gene editing system; or (3) a combination of (1) and (2). In an embodiment, the ZBTB32 inhibitor comprises: (1) a gene editing system targeting the ZBTB32 gene or one or more components thereof. In an embodiment, the ZBTB32 inhibitor comprises (2) a nucleic acid encoding one or more components of the gene editing system. In an embodiment, the ZBTB32 inhibitor comprises a combination of (1) and (2).

[0011] In another aspect, disclosed herein is a method of increasing the therapeutic efficacy of a CAR-expressing cell, e.g., a cell of any of the preceding claims, e.g., a CAR19-expressing cell (e.g., CTL019 or CTL119), comprising: reducing the expression and/or a biological activity of ZBTB32 in the cell, thereby increasing the therapeutic efficacy of the CAR-expressing cell.

[0012] In yet another aspect, provided herein is method of increasing the therapeutic efficacy of a CAR-expressing cell, e.g., a cell of any of the preceding claims, e.g., a CAR19-expressing cell (e.g., CTL019 or CTL119), comprising: contacting the cell with a ZBTB32 inhibitor, e.g., a ZBTB32 inhibitor described herein, thereby increasing the therapeutic efficacy of the CAR-expressing cell.

[0013] In an embodiment, the inhibitor is: (a) a small molecule that reduces the expression and/or a biological activity of ZBTB32; (b) a gene editing system targeting the ZBTB32 gene; (c) a nucleic acid (e.g., an siRNA, shRNA, or ASO) that inhibits expression of ZBTB32; (d) a protein (e.g., a dominant negative) encoded by the ZBTB32 gene, or a binding partner of a protein encoded by the ZBTB32 gene; (e) an antibody molecule (e.g., a single-domain antibody (sdAb) or nanobody) that binds to a protein encoded by the ZBTB32 gene; (f) a nucleic acid encoding (b) or a component thereof or any of (c)-(d); or (g) any combination of (a)-(f).

[0014] In an embodiment, the cell is contacted with the ZBTB32 inhibitor ex vivo.

[0015] In an embodiment, the cell is contacted with the ZBTB32 inhibitor in vivo.

[0016] In an embodiment, the cell is contacted with the ZBTB32 inhibitor in vivo prior to delivery of a nucleic acid encoding a CAR into the cell.

[0017] In an embodiment, the cell is contacted with the ZBTB32 inhibitor in vivo after the cells have been administered to a subject in need thereof.

[0018] In an embodiment, the method further comprises contacting the cell with a Tet2 inhibitor.

[0019] In an embodiment, the method further comprises contacting the cell with an IKZF2 inhibitor.

[0020] In an embodiment, the cell has been contacted with a Tet2 inhibitor.

[0021] In an embodiment, the cell has been contacted with an IKZF2 inhibitor, e.g., an IKZF2 inhibitor described herein.

[0022] In one aspect, provided herein is a method for treating a cancer in a subject, the method comprising administering to the subject an effective amount of a CAR-expressing cell described herein.

[0023] In a related aspect, the disclosure provides a CAR-expressing cell described herein for use in treating a cancer in a subject.

[0024] In another aspect, provided herein is a CAR-expressing cell therapy for use in treating a subject in need thereof, wherein the CAR-expressing cell therapy is used in combination with a ZBTB32 inhibitor, e.g., a ZBTB32 inhibitor described herein.

[0025] In an embodiment, the subject receives a pre-treatment of the ZBTB32 inhibitor, prior to the initiation of the CAR-expressing cell therapy.

[0026] In an embodiment, the subject receives concurrent treatment with the ZBTB32 inhibitor and the CAR expressing cell therapy.

[0027] In an embodiment, the subject receives treatment with the ZBTB32 inhibitor post-CAR-expressing cell therapy.

[0028] In an embodiment, the subject has a disease associated with expression of a tumor antigen (e.g., a tumor antigen described herein), e.g., a proliferative disease, a precancerous condition, a cancer, and a non-cancer related indication associated with expression of the tumor antigen.

[0029] In an embodiment, the use further comprises determining the expression and/or a biological activity of ZBTB32 in the cell.

[0030] In an aspect, provided herein is a method of treating a subject, the method comprising: administering to the subject an effective amount of a ZBTB32 inhibitor, e.g., a ZBTB32 inhibitor described herein, thereby treating the subject, wherein the subject has received, is receiving, or is about to receive therapy comprising a CAR-expressing cell.

[0031] In a related aspect, the disclosure provides a ZBTB32 inhibitor, e.g., a ZBTB32 inhibitor described herein, for use in the treatment of a subject, wherein the subject has received, is receiving, or is about to receive therapy comprising a CAR-expressing cell.

[0032] In yet another aspect, provided herein is a method of manufacturing a CAR-expressing cell, comprising: introducing a nucleic acid encoding a CAR into a cell such that said nucleic acid (or CAR-encoding portion thereof) integrates into the genome of the cell, such that the expression and/or a biological activity of ZBTB32 is reduced, thereby manufacturing the CAR-expressing cell.

[0033] In an embodiment, the nucleic acid integrates within the ZBTB32 gene (e.g., within an intron or exon of the ZBTB32 gene).

[0034] In an embodiment, the nucleic acid integrates within a gene other than the ZBTB32 gene (e.g., within an intron or exon of the other gene).

[0035] In an embodiment, the CAR-expressing cell is manufactured according to a method of manufacture or production of a CAR-expressing cell, e.g., as described herein.

[0036] In one aspect, provided herein is a method of manufacturing a CAR-expressing cell, comprising:

contacting a CAR-expressing cell ex vivo with a ZBTB32 inhibitor, e.g., a ZBTB32 inhibitor described herein, thereby manufacturing the CAR-expressing cell.

[0037] In an embodiment, the CAR-expressing cell has an improved property, e.g., an improved property described herein, compared to the same CAR-expressing cell that has not been contacted ex vivo with the ZBTB32 inhibitor.

[0038] In an embodiment, the improved property comprises an enhanced T cell-mediated anti-tumor response, an increased proliferation and/or cytokine production, a reduced T cell exhaustion, an enhanced resistance to exhaustion and enhanced long-term immune protection in vivo, an increased expression of MHCII and/or MHCII transactivator CIITA, a higher expansion rate in vivo, an improved immunological memory phenotype, or any combination thereof.

[0039] In an embodiment, the CAR-expressing cell is manufactured according to a method of manufacture or production of a CAR-expressing cell, e.g., as described herein.

[0040] In another aspect, the disclosure provides a vector comprising a nucleotide sequence encoding a CAR and a nucleotide sequence encoding a ZBTB32 inhibitor.

[0041] In an embodiment, the inhibitor is: (a) a gene editing system targeting the ZBTB32 gene; (b) a nucleic acid (e.g., an siRNA, shRNA, or ASO) that inhibits expression of ZBTB32; (c) a protein (e.g., a dominant negative) encoded by the ZBTB32 gene, or a binding partner of a protein encoded by the ZBTB32 gene; (d) an antibody molecule (e.g., a single-domain antibody (sdAb) or nanobody) that binds to a protein encoded by the ZBTB32 gene; or (e) any combination of (a)-(d).

[0042] In an embodiment, the nucleotide sequence encoding the CAR and the nucleotide sequence encoding the inhibitor are separated by a 2A site.

[0043] In another aspect, disclosed herein is a composition for ex vivo manufacture of a CAR-expressing cell, comprising a ZBTB32 inhibitor, e.g., a ZBTB32 inhibitor described herein.

[0044] In an embodiment, the inhibitor is: (a) a gene editing system targeting the ZBTB32 gene; (b) a nucleic acid (e.g., an siRNA, shRNA, or ASO) that inhibits expression of ZBTB32; (c) a protein (e.g., a dominant negative) encoded by the ZBTB32 gene, or a binding partner of a protein encoded by the ZBTB32 gene; (d) an antibody molecule (e.g., a single-domain antibody (sdAb) or nanobody) that binds to a protein encoded by the ZBTB32 gene; or (e) any combination of (a)-(d).

[0045] In an embodiment, the nucleotide sequence encoding the CAR and the nucleotide sequence encoding the inhibitor are separated by a 2A site.

[0046] In one aspect, provided herein is a population of cells comprising one or more CAR-expressing cells described herein, wherein the population of cells comprises a higher (e.g., at least 1, 2, 3, 4, 5, 6, 7, 8, 9, or 10-fold higher) percentage of cells have a phenotype or express a marker described herein (e.g., a phenotype or a marker associated with a central memory T (T_{CM}) cell or a stem memory T (T_{SCM}) cell) than a reference population of cells.

[0047] In yet another aspect, provided herein is a population of cells comprising one or more CAR-expressing cells described herein, wherein the percentage of cytokine producing cells in the population is at least 50% (e.g., at least 60%, 70%, 80%, 85%, 90%, 95%, 97%, or 99%) higher than that of a reference population of cells.

[0048] In an embodiment, the reference population of cells is a population of cells which does not comprise one or more cells in which the expression and/or a biological activity of ZBTB32 in the cell has been reduced.

[0049] In a further aspect, provided herein is a population of cells comprising one or more CAR-expressing cells described herein, wherein at least 50% (e.g., at least 60%, 70%, 80%, 85%, 90%, 95%, 97%, or 99%) of the population of cells have a phenotype or express a marker described herein (e.g., a phenotype or a marker associated with a central memory T (TCM) cell or a stem memory T (TSCM) cell).

[0050] In some embodiments of any of the CAR-expressing cells, methods or uses disclosed herein, the gene editing system is a CRISPR/Cas system, a zinc finger nuclease system, a TALEN system, or a meganuclease system. In an embodiment, gene editing system binds to a target sequence in the ZBTB32 gene. In an embodiment, the gene editing system binds to a target sequence in an early exon or intron of the ZBTB32 gene. In an embodiment, the gene editing system binds a target sequence of the ZBTB32 gene, and the target sequence is upstream of exon 4, e.g., in exon 1, exon 2, or exon 3. In an embodiment, the gene editing system binds to a target sequence in a late exon or intron of the ZBTB32 gene. In an embodiment, the gene editing system binds a target sequence that is downstream of a preantepenultimate exon, e.g., is in an antepenultimate exon, a penultimate exon, or a last exon of the ZBTB32 gene. In an embodiment, the gene editing system binds a target sequence that comprises a splice junction of the ZBTB32 gene. In an embodiment, the gene editing system binds to a target sequence in a coding region of the ZBTB32 gene. In an embodiment, the gene editing system binds to a target sequence in a non-coding region of the ZBTB32 gene. In an embodiment, the gene editing system binds to a target sequence in a regulatory element of the ZBTB32 gene. In an embodiment, the gene editing system is a CRISPR/Cas system comprising a guide RNA (gRNA) molecule comprising a targeting sequence which hybridizes to a target sequence of the ZBTB32 gene.

[0051] In some embodiments of any of the CAR-expressing cells, methods or uses disclosed herein, the ZBTB32 inhibitor comprises a small interfering RNA (siRNA) or a small hairpin RNA (shRNA) targeting the ZBTB32 gene, or a nucleic acid encoding the siRNA or shRNA. In an embodiment, the siRNA or shRNA comprises a nucleotide sequence complementary to a sequence of an mRNA of the ZBTB32 gene. In an embodiment, the ZBTB32 inhibitor comprises an antisense oligonucleotide (ASO) targeting the ZBTB32 gene, or a nucleic acid encoding the ASO. In an embodiment, the ASO comprises a nucleotide sequence complementary to a sequence of an mRNA of the ZBTB32 gene.

[0052] In some embodiments of any of the CAR-expressing cells, methods or uses disclosed herein, the ZBTB32 inhibitor comprises a protein. In an embodiment, the ZBTB32 inhibitor comprises a dominant negative variant of a protein encoded by the ZBTB32 gene, or a nucleic acid encoding the dominant negative variant. In an embodiment, the ZBTB32 inhibitor comprises a dominant negative binding partner of a protein encoded by the ZBTB32 gene, or a nucleic acid encoding the dominant negative binding partner.

[0053] In some embodiments of any of the CAR-expressing cells, methods or uses disclosed herein, the ZBTB32 inhibitor comprises an antibody molecule, e.g., a single-domain antibody (sdAb) or nanobody, which binds to a protein encoded by the ZBTB32 gene, or a nucleic acid encoding the antibody molecule.

[0054] In some embodiments of any of the CAR-expressing cells, methods or uses disclosed herein, the ZBTB32 inhibitor comprises a nucleic acid encoding a single-domain antibody (sdAb) or nanobody that binds to a protein encoded by the ZBTB32 gene.

[0055] In some embodiments of any of the CAR-expressing cells, methods or uses disclosed herein, the cell has reduced expression of ZBTB32, e.g., reduced by at least 50%, 60%, 70%, 80%, 90%, 95%, 98%, or 99%, compared to a reference cell. In an embodiment, the level of ZBTB32 protein is reduced. In an embodiment, the stability of ZBTB32 protein is reduced. In an embodiment, the level of ZBTB32 mRNA is reduced. In an embodiment, the stability of ZBTB32 mRNA is reduced.

[0056] In an embodiment, the cell has reduced ZBTB32 transcription. In an embodiment, the cell has reduced ZBTB32 translation.

[0057] In some embodiments of any of the CAR-expressing cells, methods or uses disclosed herein, the ZBTB32 genomic locus is altered (e.g., disrupted). In an embodiment, the ZBTB32 gene comprises a deletion or insertion, e.g., a deletion or insertion that disrupts the open reading frame (ORF) or a CLL super enhancer in the ZBTB32 genomic locus. In an embodiment, the ZBTB32 gene comprises an epigenomic modification, e.g., an epigenomic modification that reduces the expression of ZBTB32.

[0058] In some embodiments of any of the CAR-expressing cells, methods or uses disclosed herein, the cell has a reduced biological activity of ZBTB32, e.g., reduced by at least 50%, 60%, 70%, 80%, 90%, 95%, 98%, or 99%, compared to a reference cell. In an embodiment, a transcription repressor function of ZBTB32 is reduced. In an embodiment, the interaction between ZBTB32 and one or more binding partners is reduced. In an embodiment, the one or more binding partners comprise Fanconi anemia complementation group C (FANCC), thioredoxin interacting protein (TXNIP), Vitamin D3 upregulated protein 1 (VDUP1), Zinc finger and BTB domain-containing protein 16 (Zbtb16), Zinc-finger elbow-related proline domain protein 2 (Zpo2), GATA binding protein 3 (Gata3), GATA binding protein 2 (Gata2), or B-cell lymphoma 6 (Bcl-6).

[0059] In some embodiments of any of the CAR-expressing cells, methods or uses disclosed herein, the cell has an enhanced T cell-mediated anti-tumor response.

[0060] In some embodiments of any of the CAR-expressing cells, methods or uses disclosed herein, the cell has increased proliferation and/or cytokine production.

[0061] In some embodiments of any of the CAR-expressing cells, methods or uses disclosed herein, the cell has an altered T cell state, e.g., an altered state of a dysfunctional T cell, e.g., reduced T cell exhaustion.

[0062] In some embodiments of any of the CAR-expressing cells, methods or uses disclosed herein, the cell has enhanced resistance to exhaustion and enhanced long-term immune protection in vivo.

[0063] In some embodiments of any of the CAR-expressing cells, methods or uses disclosed herein the cell has an increased expression of MHCII and/or MHCII transactivator CIITA.

[0064] In some embodiments of any of the CAR-expressing cells, methods or uses disclosed herein, the cell expands at a higher rate in vivo compared to a reference cell.

[0065] In some embodiments of any of the CAR-expressing cells, methods or uses disclosed herein, the cell has an improved immunological memory phenotype, e.g., a B cell memory phenotype.

[0066] In some embodiments of any of the CAR-expressing cells, methods or uses disclosed herein, the cell is an immune effector cell (e.g., a population of immune effector cells).

[0067] In some embodiments of any of the CAR-expressing cells, methods or uses disclosed herein, the immune effector cell is a T cell, a B cell, or an NK cell. In an embodiment, the immune effector cell is a T cell. In an embodiment, the T cell is an alpha beta T cell (αβ T cell). In an embodiment, the T cell is a CD4+ T cell, a CD8+ T cell, or a combination thereof. In an embodiment, the T cell is a CD8+ T cell or regulator T cell (Treg), e.g., a tumor infiltrated, dysfunctional CD8+ T cell or Treg. In an embodiment, the cell is a gamma delta T cell (76 T cell). In an embodiment, the cell is a B cell. In an embodiment, the cell is an NK cell.

[0068] In some embodiments of any of the CAR-expressing cells, methods or uses disclosed herein, the cell is a chimeric antigen receptor T (CART) cell, e.g., a non-responder's manufactured CART cell.

[0069] In some embodiments of any of the CAR-expressing cells, methods or uses disclosed herein, the cell is a human cell.

[0070] In some embodiments of any of the CAR-expressing cells, methods or uses disclosed herein, the cell further has reduced expression and/or a reduced biological activity of Tet2.

[0071] In some embodiments of any of the CAR-expressing cells, methods or uses disclosed herein, the cell further has reduced expression and/or a reduced biological activity of IKZF2.

[0072] In some embodiments of any of the CAR-expressing cells, methods or uses disclosed herein, the antigen-binding domain binds to a tumor antigen is selected from a group consisting of: TSHR, CD19, CD123, CD22, CD30, CD171, CS-1, CLL-1, CD33, EGFRvIII, GD2, GD3, BCMA, Tn Ag, PSMA, ROR1, FLT3, FAP, TAG72, CD38, CD44v6, CEA, EPCAM, B7H3, KIT, IL-13Ra2, Mesothelin, IL-11Ra, PSCA, PRSS21, VEGFR2, LewisY, CD24, PDGFR-beta, SSEA-4, CD20, Folate receptor alpha, ERBB2 (Her2/neu), MUC1, EGFR, NCAM, Prostase, PAP, ELF2M, Ephrin B2, IGF-I receptor, CAIX, LMP2, gp100, bcr-abl, tyrosinase, EphA2, Fucosyl GM1, sLe, GM3, TGS5, HMWMAA, o-acetyl-GD2, Folate receptor beta, TEM1/CD248, TEM7R, CLDN6, GPRCSD, CXORF61, CD97, CD179a, ALK, Polysialic acid, PLAC1, GloboH, NY-BR-1, UPK2, HAVCR1, ADRB3, PANX3, GPR20, LY6K, OR51E2, TARP, WT1, NY-ESO-1, LAGE-1a, MAGE-A1, legumain, HPV E6, E7, MAGE A1, ETV6-AML, sperm protein 17, XAGE1, Tie 2, MAD-CT-1, MAD-CT-2, Fos-related antigen 1, p53, p53 mutant, prostein, survivin and telomerase, PCTA-1/Galectin 8, MelanA/MART1, Ras mutant, hTERT, sarcoma translocation breakpoints, ML-IAP, ERG (TMPRSS2 ETS fusion gene), NA17, PAX3, Androgen receptor, Cyclin B1, MYCN, RhoC, TRP-2, CYP1B1, BORIS, SART3, PAX5, OY-TES1, LCK, AKAP-4, SSX2, RAGE-1, human telomerase reverse transcriptase, RU1, RU2, intestinal carboxyl esterase, mut hsp70-2, CD79a, CD79b, CD72, LAIR1, FCAR, LILRA2, CD300LF, CLEC12A, BST2, EMR2, LY75, GPC3, FCRL5, and IGLL1.

[0073] In an embodiment, the tumor antigen is CD19, BCMA, CD20, or CD22. In an embodiment, the tumor antigen is CD19. In an embodiment, the tumor antigen is BCMA. In an embodiment, the tumor antigen is CD20. In an embodiment, the tumor antigen is CD22.

[0074] In an embodiment, the antigen-binding domain is an antibody or antibody fragment as described in, e.g., WO2012/079000 or WO2014/153270.

[0075] In some embodiments of any of the CAR-expressing cells, methods or uses disclosed herein, the transmembrane domain comprises: an amino acid sequence having at least one, two or three modifications but not more than 20, 10 or 5 modifications of an amino acid sequence of SEQ ID NO: 12 of WO2012/079000, or a sequence with 95-99% identity to an amino acid sequence of SEQ ID NO: 12 WO2012/079000; or the sequence of SEQ ID NO: 12 WO2012/079000.

[0076] In an embodiment, the antigen binding domain is connected to the transmembrane domain by a hinge region, wherein said hinge region comprises SEQ ID NO: 2 or SEQ ID NO: 6 of WO2012/079000, or a sequence with 95-99% identity thereof.

[0077] In some embodiments of any of the CAR-expressing cells, methods or uses disclosed herein, the intracellular signaling domain comprises a primary signaling domain and/or a costimulatory signaling domain, wherein the primary signaling domain comprises a functional signaling domain of a protein chosen from CD3 zeta, CD3 gamma, CD3 delta, CD3 epsilon, common FcR gamma (FCER1G), FcR beta (Fc Epsilon Rib), CD79a, CD79b, Fc gamma Rlla, DAP10, or DAP12. In an embodiment, the primary signaling domain comprises: an amino acid sequence having at least one, two or three modifications but not more than 20, 10 or 5 modifications of an amino acid sequence of SEQ ID NO: 18 or SEQ ID NO: 20 of WO2012/079000, or a sequence with 95-99% identity to an amino acid sequence of SEQ ID NO: 18 or SEQ ID NO: 20 of WO2012/079000; or the amino acid sequence of SEQ ID NO: 18 or SEQ ID NO: 20 of WO2012/079000.

[0078] In some embodiments of any of the CAR-expressing cells, methods or uses disclosed herein, the intracellular signaling domain comprises a costimulatory signaling domain, or a primary signaling domain and a costimulatory signaling domain, wherein the costimulatory signaling domain comprises a functional signaling domain of a protein selected from the group consisting of CD27, CD28, 4-1BB (CD137), OX40, CD30, CD40, PD-1, ICOS, lymphocyte function-associated antigen-1 (LFA-1), CD2, CD7, LIGHT, NKG2C, B7-H3, a ligand that specifically binds with CD83, CDS, ICAM-1, GITR, BAFFR, HVEM (LIGHTR), SLAMF7, NKp80 (KLRF1), CD160, CD19, CD4, CD8alpha, CD8beta, IL2R beta, IL2R gamma, IL7R alpha, ITGA4, VLA1, CD49a, ITGA4, IA4, CD49D, ITGA6, VLA-6, CD49f, ITGAD, CD11d, ITGAE, CD103, ITGAL, CD11a, LFA-1, ITGAM, CD11b, ITGAX, CD11c, ITGB1, CD29, ITGB2, CD18, LFA-1, ITGB7, TNFR2, TRANCE/RANKL, DNAM1 (CD226), SLAMF4 (CD244, 2B4), CD84, CD96 (Tactile), CEACAM1, CRTAM, Ly9 (CD229), CD160 (BY55), PSGL1, CD100 (SEMA4D), CD69, SLAMF6 (NTB-A, Ly108), SLAM (SLAMF1, CD150, IPO-3), BLAME (SLAMF8), SELPLG (CD162), LTBR, LAT, GADS, SLP-76, PAG/Cbp, NKp44, NKp30, NKp46, and NKG2D. In an embodiment, the costimulatory signaling domain comprises an amino acid sequence having at least one, two or three modifications but not more than 20, 10 or 5 modifications of an amino acid sequence of SEQ ID NO: 14 or SEQ ID NO: 16 of WO2012/079000, or a sequence with 95-99% identity to an amino acid sequence of SEQ ID NO: 14 or SEQ ID NO: 16 of WO2012/079000. In an embodiment, the costimulatory signaling domain comprises a sequence of SEQ ID NO: 14 or SEQ ID NO: 16 of WO2012/079000. In an embodiment, the intracellular domain comprises the sequence of SEQ ID NO: 14 or SEQ ID NO: 16 of WO2012/079000, and the sequence of SEQ ID NO: 18 or SEQ ID NO: 20 of WO2012/079000, wherein the sequences comprising the intracellular signaling domain are expressed in the same frame and as a single polypeptide chain.

[0079] In some embodiments of any of the CAR-expressing cells, methods or uses disclosed herein, the CAR further comprises a leader sequence comprises the sequence of SEQ ID NO: 2 of WO2012/079000.

[0080] In some embodiments of any of the CAR-expressing cells, methods or uses disclosed herein, the cancer is a hematological cancer. In an embodiment, the cancer is a lymphoma, a myeloma, or a leukemia. In an embodiment, the cancer is chronic lymphocytic leukemia (CLL), acute myeloid leukemia (AML), acute lymphoid leukemia (ALL), B-cell acute lymphoid leukemia (B-ALL), T-cell acute lymphoid leukemia (T-ALL), chronic myelogenous leukemia (CML), B cell prolymphocytic leukemia, blastic plasmacytoid dendritic cell neoplasm, Burkitt's lymphoma, diffuse large B cell lymphoma, follicular lymphoma, hairy cell leukemia, small cell- or a large cell-follicular lymphoma, a malignant lymphoproliferative condition, MALT lymphoma, mantle cell lymphoma, marginal zone lymphoma, multiple myeloma, myelodysplasia and myelodysplastic syndrome, non-Hodgkin's lymphoma, Hodgkin's lymphoma, plasmablastic lymphoma, plasmacytoid dendritic cell neoplasm, Waldenström macroglobulinemia, or pre-leukemia.

[0081] In an embodiment, the cancer is a B cell malignancy, e.g., B cell lymphoma or leukemia.

[0082] In an embodiment, the cancer is a lymphoma, e.g., a non-Hodgkin's lymphoma, a diffuse large B-cell lymphoma (DLBCL), e.g., activated B-cell (ABC) DLBCL or germinal center B-cell (GCB) DLBCL. In an embodiment, the cancer is a myeloma, e.g., a multiple myeloma (MM). In an embodiment, the cancer is a leukemia, e.g., an acute lymphocytic leukemia (ALL) or a chronic lymphocytic leukemia (CLL).

[0083] In some embodiments of any of the CAR-expressing cells, methods or uses disclosed herein, the cancer is a solid tumor. In an embodiment, the solid tumor is associated with immune cell infiltration. In an embodiment, the cancer is colon cancer, rectal cancer, renal-cell carcinoma, liver cancer, non-small cell carcinoma of the lung, cancer of the small intestine, cancer of the esophagus, melanoma, bone cancer, pancreatic cancer, skin cancer, cancer of the head or neck, cutaneous or intraocular malignant melanoma, uterine cancer, ovarian cancer, rectal cancer, cancer of the anal region, stomach cancer, testicular cancer, uterine cancer, carcinoma of the fallopian tubes, carcinoma of the endometrium, carcinoma of the cervix, carcinoma of the vagina, carcinoma of the vulva, Hodgkin's disease, non-Hodgkin's lymphoma, cancer of the endocrine system, cancer of the thyroid gland, cancer of the parathyroid gland, cancer of the adrenal gland, sarcoma of soft tissue, cancer of the urethra, cancer of the penis, solid tumors of childhood, cancer of the bladder, cancer of the kidney or ureter, carcinoma of the renal pelvis, neoplasm of the central nervous system (CNS), primary CNS lymphoma, tumor angiogenesis, spinal axis tumor, brain stem glioma, pituitary adenoma, Kaposi's sarcoma, epidermoid cancer, squamous cell cancer, T-cell lymphoma, an environmentally induced cancer, or a metastatic lesion thereof.

[0084] In some embodiments of any of the CAR-expressing cells, methods or uses disclosed herein, the cancer expresses a higher level of ZBTB32, e.g., as determined by a method described herein.

[0085] In some embodiments the methods or uses disclosed herein further comprise administering to the subject a second therapeutic agent or modality, e.g., a cancer therapy described herein.

[0086] In some embodiments the methods or uses disclosed herein further comprise administering to the subject a ZBTB32 inhibitor, e.g., a ZBTB32 inhibitor described herein.

### Methods Relating to Uses of ZBTB32 Inhibitor

[0087] In an aspect, the disclosure provides a method of treating a cancer in a subject, comprising: administering to the subject an effective amount of a ZBTB32 inhibitor and a second therapeutic agent or modality, thereby threating the cancer in the subject.

[0088] In an embodiment, the ZBTB32 inhibitor is administered prior to, concurrently with, or post administration of the second therapeutic agent or modality. In an embodiment, the ZBTB32 inhibitor comprises a small molecule.

[0089] In an embodiment, the ZBTB32 inhibitor comprises: (1) a gene editing system targeting the ZBTB32 gene or one or more components thereof; (2) a nucleic acid encoding one or more components of the gene editing system; or (3) a combination of (1) and (2).

[0090] In a related aspect, provided herein is a ZBTB32 inhibitor for use in treating a cancer in a subject, wherein the ZBTB32 inhibitor is used in combination with a second therapeutic agent or modality.

[0091] In an embodiment, the ZBTB32 inhibitor is administered prior to, concurrently with, or post administration of the second therapeutic agent or modality. In an embodiment, the ZBTB32 inhibitor comprises a small molecule.

[0092] In an embodiment, the ZBTB32 inhibitor comprises: (1) a gene editing system targeting the ZBTB32 gene or one or more components thereof; (2) a nucleic acid encoding one or more components of the gene editing system; or (3) a combination of (1) and (2).

[0093] In one aspect, provided herein is method of increasing the efficacy of a therapeutic agent or modality, comprising: administering to the subject an effective amount of a ZBTB32 inhibitor, e.g., a ZBTB32 inhibitor described herein, thereby increasing the efficacy of the therapeutic agent of modality.

[0094] In an embodiment, the subject has a cancer, e.g., a cancer described herein.

[0095] In an embodiment, the therapeutic agent or modality comprises an immunotherapy or a cell therapy, e.g., an immunotherapy or a cell therapy described herein.

[0096] In a related aspect, provided herein is a ZBTB32 inhibitor, e.g., a ZBTB32 inhibitor described herein, for use in increasing the efficacy of a therapeutic agent or modality in a subject.

[0097] In an embodiment, the subject has a cancer, e.g., a cancer described herein.

[0098] In an embodiment, the therapeutic agent or modality comprises an immunotherapy or a cell therapy, e.g., an immunotherapy or a cell therapy described herein.

[0099] In one aspect, provided herein is a method of increasing an immune response in a subject, comprising: administering to the subject an effective amount of a ZBTB32 inhibitor, e.g., a ZBTB32 inhibitor described herein, thereby increasing the immune response in the subject. In an embodiment, the subject has a cancer, e.g., a cancer described herein. In an embodiment, the therapeutic agent or modality comprises an immunotherapy or a cell therapy, e.g., an immunotherapy or a cell therapy described herein.

[0100] In a related aspect, the disclosure provides ZBTB32 inhibitor, e.g., a ZBTB32 inhibitor described herein, for use in increasing an immune response in a subject. In an embodiment, the subject has a cancer, e.g., a cancer described herein. In an embodiment, the therapeutic agent or modality comprises an immunotherapy or a cell therapy, e.g., an immunotherapy or a cell therapy described herein.

[0101] In yet another aspect, provided herein is a method of inhibiting the expression and/or a biological activity of ZBTB32, comprising: contacting a cell (e.g., an immune cell) with a ZBTB32 inhibitor, e.g., a ZBTB32 inhibitor described herein; and optionally further contacting the cell with a second therapeutic agent or modality; thereby treating the cell.

[0102] In an embodiment, the ZBTB32 inhibitor is contacted with the cell in vitro, ex vivo, or in vivo.

[0103] In one aspect, the disclosure provides a gene editing system targeting the ZBTB32 gene as described herein.

[0104] In an embodiment, the system comprises a CRISPR/Cas gene editing system, a zinc finger nuclease system, a TALEN system, or a meganuclease system.

[0105] In an embodiment, the system comprises a CRISPR/Cas gene editing system.

[0106] In an embodiment, the system comprises a gRNA molecule comprising a targeting sequence specific to a sequence of the ZBTB32 gene, and a Cas9 protein; a gRNA molecule comprising a targeting sequence specific to a sequence of the ZBTB32 gene, and a nucleic acid encoding a Cas9 protein; a nucleic acid encoding a gRNA molecule comprising a targeting sequence specific to a sequence of the ZBTB32 gene, and a Cas9 protein; or a nucleic acid encoding a gRNA molecule comprising a targeting sequence specific to a sequence of the ZBTB32 gene, and a nucleic acid encoding a Cas9 protein.

[0107] In an embodiment, the system further comprises a template DNA. In an embodiment, the template DNA comprises nucleic acid sequence encoding a CAR, e.g., a CAR as described herein.

[0108] In some embodiments of any of the methods or uses disclosed herein, the gene editing system is a CRISPR/Cas system, a zinc finger nuclease system, a TALEN system, or a meganuclease system. In an embodiment, gene editing system binds to a target sequence in the ZBTB32 gene. In an embodiment, the gene editing system binds to a target sequence in an early exon or intron of the ZBTB32 gene. In an embodiment, the gene editing system binds a target sequence of the ZBTB32 gene, and the target sequence is upstream of exon 4, e.g., in exon 1, exon 2, or exon 3. In an embodiment, the gene editing system binds to a target sequence in a late exon or intron of the ZBTB32 gene. In an embodiment, the gene editing system binds a target sequence that is downstream of a preantepenultimate exon, e.g., is in an antepenultimate exon, a penultimate exon, or a last exon of the ZBTB32 gene. In an embodiment, the gene editing system binds a target sequence that comprises a splice junction of the ZBTB32 gene. In an embodiment, the gene editing system binds to a target sequence in a coding region of the ZBTB32 gene. In an embodiment, the gene editing system binds to a target sequence in a non-coding region of the ZBTB32 gene. In an embodiment, the gene editing system binds to a target sequence in a regulatory element of the ZBTB32 gene. In an embodiment, the gene editing system is a CRISPR/Cas system comprising a guide RNA (gRNA) molecule comprising a targeting sequence which hybridizes to a target sequence of the ZBTB32 gene.

[0109] In some embodiments of any of the methods or uses disclosed herein, the ZBTB32 inhibitor comprises a small interfering RNA (siRNA) or a small hairpin RNA (shRNA) targeting the ZBTB32 gene, or a nucleic acid encoding the siRNA or shRNA. In an embodiment, the siRNA or shRNA comprises a nucleotide sequence complementary to a sequence of an mRNA of the ZBTB32 gene. In an embodiment, the ZBTB32 inhibitor comprises an antisense oligonucleotide (ASO) targeting the ZBTB32 gene, or a nucleic acid encoding the ASO. In an embodiment, the ASO comprises a nucleotide sequence complementary to a sequence of an mRNA of the ZBTB32 gene.

[0110] In some embodiments of any of the methods or uses disclosed herein, the ZBTB32 inhibitor comprises a protein. In an embodiment, the ZBTB32 inhibitor comprises a dominant negative variant of a protein encoded by the ZBTB32 gene, or a nucleic acid encoding the dominant negative variant. In an embodiment, the ZBTB32 inhibitor comprises a dominant negative binding partner of a protein encoded by the ZBTB32 gene, or a nucleic acid encoding the dominant negative binding partner.

[0111] In some embodiments of any of the methods or uses disclosed herein, the ZBTB32 inhibitor comprises an antibody molecule, e.g., a single-domain antibody (sdAb) or nanobody, which binds to a protein encoded by the ZBTB32 gene, or a nucleic acid encoding the antibody molecule.

[0112] In some embodiments of any of the methods or uses disclosed herein, the ZBTB32 inhibitor comprises a nucleic acid encoding a single-domain antibody (sdAb) or nanobody that binds to a protein encoded by the ZBTB32 gene.

[0113] In some embodiments of any of the methods or uses disclosed herein, the cell has reduced expression of ZBTB32, e.g., reduced by at least 50%, 60%, 70%, 80%, 90%, 95%, 98%, or 99%, compared to a reference cell. In an embodiment, the level of ZBTB32 protein is reduced. In an embodiment, the stability of ZBTB32 protein is reduced. In an embodiment, the level of ZBTB32 mRNA is reduced. In an embodiment, the stability of ZBTB32 mRNA is reduced.

[0114] In an embodiment, the cell has reduced ZBTB32 transcription. In an embodiment, the cell has reduced ZBTB32 translation.

[0115] In some embodiments of any of the methods or uses disclosed herein, the ZBTB32 genomic locus is altered (e.g., disrupted). In an embodiment, the ZBTB32 gene comprises a deletion or insertion, e.g., a deletion or insertion that disrupts the open reading frame (ORF) or a CLL super enhancer in the ZBTB32 genomic locus. In an embodiment, the ZBTB32 gene comprises an epigenomic modification, e.g., an epigenomic modification that reduces the expression of ZBTB32.

[0116] In some embodiments of any of the methods or uses disclosed herein, the cell has a reduced biological activity of ZBTB32, e.g., reduced by at least 50%, 60%, 70%, 80%, 90%, 95%, 98%, or 99%, compared to a reference cell. In an embodiment, a transcription repressor function of ZBTB32 is reduced. In an embodiment, the interaction between ZBTB32 and one or more binding partners is reduced. In an embodiment, the one or more binding partners comprise Fanconi anemia complementation group C (FANCC), thioredoxin interacting protein (TXNIP), Vitamin D3 upregulated protein 1 (VDUP1), Zinc finger and BTB domain-containing protein 16 (Zbtb16), Zinc-finger elbow-related proline domain protein 2 (Zpo2), GATA binding protein 3 (Gata3), GATA binding protein 2 (Gata2), or B-cell lymphoma 6 (Bcl-6).

[0117] In some embodiments of any of the methods or uses disclosed herein, the cell has an enhanced T cell-mediated anti-tumor response.

[0118] In some embodiments of any of the methods or uses disclosed herein, the cell has increased proliferation and/or cytokine production.

[0119] In some embodiments of any of the methods or uses disclosed herein, the cell has an altered T cell state, e.g., an altered state of a dysfunctional T cell, e.g., reduced T cell exhaustion.

[0120] In some embodiments of any of the methods or uses disclosed herein, the cell has enhanced resistance to exhaustion and enhanced long-term immune protection in vivo.

[0121] In some embodiments of any of the CAR-expressing cells, methods or uses disclosed herein the cell has an increased expression of MHCII and/or MHCII transactivator CIITA.

[0122] In some embodiments of any of the methods or uses disclosed herein, the inhibitor results in a higher cell expansion rate in vivo.

[0123] In some embodiments of any of the methods or uses disclosed herein, the inhibitor improves an immunological memory phenotype, e.g., a B cell memory phenotype.

In some embodiments of any of the methods or uses disclosed herein, the cancer is a hematological cancer. In an embodiment, the cancer is a lymphoma, a myeloma, or a leukemia. In an embodiment, the cancer is chronic lymphocytic leukemia (CLL), acute myeloid leukemia (AML), acute lymphoid leukemia (ALL), B-cell acute lymphoid leukemia (B-ALL), T-cell acute lymphoid leukemia (T-ALL), chronic myelogenous leukemia (CML), B cell prolymphocytic leukemia, blastic plasmacytoid dendritic cell neoplasm, Burkitt's lymphoma, diffuse large B cell lymphoma, follicular lymphoma, hairy cell leukemia, small cell- or a large cell-follicular lymphoma, a malignant lymphoproliferative condition, MALT lymphoma, mantle cell lymphoma, marginal zone lymphoma, multiple myeloma, myelodysplasia and myelodysplastic syndrome, non-Hodgkin's lymphoma, Hodgkin's lymphoma, plasmablastic lymphoma, plasmacytoid dendritic cell neoplasm, Waldenströmmacroglobulinemia, or pre-leukemia.

[0124] In an embodiment, the cancer is a B cell malignancy, e.g., B cell lymphoma or leukemia.

[0125] In an embodiment, the cancer is a lymphoma, e.g., a non-Hodgkin's lymphoma, a diffuse large B-cell lymphoma (DLBCL), e.g., activated B-cell (ABC) DLBCL or germinal center B-cell (GCB) DLBCL. In an embodiment, the cancer is a myeloma, e.g., a multiple myeloma (MM). In an embodiment, the cancer is a leukemia, e.g., an acute lymphocytic leukemia (ALL) or a chronic lymphocytic leukemia (CLL).

[0126] In some embodiments of any of the methods or uses disclosed herein, the cancer is a solid tumor. In an embodiment, the solid tumor is associated with immune cell infiltration. In an embodiment, the cancer is colon cancer, rectal cancer, renal-cell carcinoma, liver cancer, non-small cell carcinoma of the lung, cancer of the small intestine, cancer of the esophagus, melanoma, bone cancer, pancreatic cancer, skin cancer, cancer of the head or neck, cutaneous or intraocular malignant melanoma, uterine cancer, ovarian cancer, rectal cancer, cancer of the anal region, stomach cancer, testicular cancer, uterine cancer, carcinoma of the fallopian tubes, carcinoma of the endometrium, carcinoma of the cervix, carcinoma of the vagina, carcinoma of the vulva, Hodgkin's disease, non-Hodgkin's lymphoma, cancer of the endocrine system, cancer of the thyroid gland, cancer of the parathyroid gland, cancer of the adrenal gland, sarcoma of soft tissue, cancer of the urethra, cancer of the penis, solid tumors of childhood, cancer of the bladder, cancer of the kidney or ureter, carcinoma of the renal pelvis, neoplasm of the central nervous system (CNS), primary CNS lymphoma, tumor angiogenesis, spinal axis tumor, brain stem glioma, pituitary adenoma, Kaposi's sarcoma, epidermoid cancer, squamous cell cancer, T-cell lymphoma, an environmentally induced cancer, or a metastatic lesion thereof.

[0127] In some embodiments of any of the methods or uses disclosed herein, the cancer expresses a higher level of ZBTB32, e.g., as determined by a method described herein.

[0128] In some embodiments of any of the methods or uses disclosed herein, the subject is in need of having an increased immune response.

[0129] In some embodiments the methods or uses disclosed herein further comprise identifying the subject as in need of having an increased immune response.

[0130] In some embodiments the methods or uses disclosed herein further comprise determining the expression and/or a biological activity of ZBTB32 in the cell.

[0131] In some embodiments the methods or uses disclosed herein further comprise determining a signature associated with poor CART therapy response.

[0132] In some embodiments of any of the methods or uses disclosed herein, the second therapeutic agent or modality comprises an immunotherapy.

[0133] In some embodiments of any of the methods or uses disclosed herein, the second therapeutic agent or modality comprises an immune checkpoint inhibitor, e.g., an immune checkpoint inhibitor described herein. In an embodiment, the second therapeutic agent or modality comprises a PD-1 inhibitor, a TIM-3 inhibitor, a LAG-3 inhibitor, a CTLA-4 inhibitor, a TIGIT inhibitor, a GITR agonist, a PD-L1 inhibitor, a cytokine, a chimeric antigen receptor, an estrogen receptor antagonist, a CDK4/6 inhibitor, a CXCR2 inhibitor, a CSF-1/1R binding agent, an A2Ar antagonist, an IDO inhibitor, a STING agonist, a Galectin inhibitor, a MEK inhibitor, a c-MET inhibitor, a TGF-b inhibitor, an IL-1b inhibitor or an MDM2 inhibitor.

[0134] In some embodiments of any of the methods or uses disclosed herein, the second therapeutic agent or modality comprises a cell therapy, e.g., a T cell therapy, e.g., a CAR-expressing cell therapy described herein.

[0135] In some embodiments of any of the methods or uses disclosed herein, the second therapeutic agent or modality comprises a targeted therapy.

[0136] In some embodiments of any of the methods or uses disclosed herein, the second therapeutic agent or modality comprises a chemotherapy.

[0137] In some embodiments of any of the methods or uses disclosed herein, the second therapeutic agent or modality comprises a radiation therapy.

[0138] In some embodiments of any of the methods or uses disclosed herein, the second therapeutic agent or modality comprises a surgery.

[0139] In some embodiments of any of the methods or uses disclosed herein, the second therapeutic agent or modality comprises a hormone therapy.

[0140] In some embodiments of any of the methods or uses disclosed herein, the second therapeutic agent or modality comprises an angiogenesis inhibitor.

[0141] Although methods and materials similar or equivalent to those described herein can be used in the practice or testing of the present disclosure, suitable methods and materials are described below. All publications, patent applications, patents, and other references (e.g., sequence database reference numbers) mentioned herein are incorporated by reference in their entirety. For example, all GenBank, Unigene, and Entrez sequences referred to herein, e.g., in any Table herein, are incorporated by reference. Unless otherwise specified, the sequence accession numbers specified herein, including in any Table herein, refer to the database entries current as of Jun. 11, 2020. When one gene or protein references a plurality of sequence accession numbers, all of the sequence variants are encompassed.

[0142] In addition, the materials, methods, and examples are illustrative only and not intended to be limiting. Headings, sub-headings or numbered or lettered elements, e.g., (a), (b), (i) etc., are presented merely for ease of reading. The use of headings or numbered or lettered elements in this document does not require the steps or elements be performed in alphabetical order or that the steps or elements are necessarily discrete from one another. Other features, objects, and advantages of the disclosure will be apparent from the description and drawings, and from the claims.

### BRIEF DESCRIPTION OF THE DRAWINGS

[0143] The patent or application file contains at least one drawing executed in color. Copies of this patent or patent application publication with color drawing(s) will be provided by the Office upon request and payment of the necessary fee.

[0144] FIG. 1 shows ZBTB32 gene expression in over 900 cancer cell lines in the Cancer Cell Line Encyclopedia database. A line indicates the transcript per million (TPM) of 10.

[0145] FIGS. 2A-2C show ZBTB32 editing and CAR19 expression. FIG. 2A shows flow cytometry analysis of GFP and CAR19 surface expression at day 10. PE-conjugated anti-CD19 CAR idiotype antibody was used to stain cell surface CAR19. FIG. 2B is a gel image showing efficient cutting of ZBTB32 gRNA6 and gRNA7 edited DNA by T7E1. FIG. 2C shows NGS results confirming the editing efficiency of ZBTB32 gRNA6 and gRNA 7. “x” indicates nucleotides insertion.

[0146] FIGS. 3A-3C show antigen-dependent proliferation and cytokine expression of ZBTB32KO CART cells. FIG. 3A provides flow cytometry analysis of % GFP+ cells demonstrating antigen-dependent proliferation of wt and ZBTB32KO CART cells in vitro. FIG. 3B depicts luminescence analysis showing wt and ZBTB32KO CART cells-mediated killing of TMD8-Luc cells in vitro. FIG. 3C shows expression of pro-inflammatory cytokines with higher levels of cytokine production by ZBTB32 KO CART than wt CART cells when co-cultured with TMD8-Luc cells in vitro.

[0147] FIGS. 4A-4B show tumor kinetics for mice treated with ZBTB32 KO CART cells or wt CART cells: FIG. 4A shows the mean tumor kinetics and FIG. 4B shows the individual tumor kinetics for all groups of mice over time. GFP wt (non-CAR), wt and ZBTB32 KO CART cells were injected at the dose of 1×10⁶ CAR+ cells per mouse on day 10 (indicated by a dotted line).

[0148] FIGS. 5A-5B show tumor kinetics for mice treated with ZBTB32 KO CART cells or wt CART cells. FIG. 5A shows the mean tumor kinetics and FIG. 5B shows the individual tumor kinetics for all groups of mice over time. Wt and ZBTB32 KO CART cells were injected at the dose of 2×10⁶ CAR+ cells per mouse on day 9 (indicated by dotted lines). PBS treated tumors grow out of compliance on day 25.

[0149] FIGS. 6A-6B show Bioluminescence of TMD8-Luc tumors treated with ZBTB32 KO CART cells or wt CART cells. FIG. 6A shows Bioluminescence (p/s) of TMD8-Luc tumors overtime. Wt and ZBTB32 KO CART cells were injected at the dose of 2×1⁰6 CAR+ cells per mouse on day 9. Solid bars indicate the median of bioluminescence for each group at each time point. FIG. 6B shows images captured on day 21 post tumor implant in PBS, ZBTB32 KO CART cells and wt CART cell treated mice.

[0150] FIGS. 7A-7D show tumor volume and tumor burden in mice treated with vehicle (PBS) ZBTB32 KO CART cells or wt CART cells. FIG. 7A shows tumor volumes as mean±SEM of each group, FIG. 7B shows tumor volumes of individual mice, FIG. 7C shows the mediam bioluminescence (p/s) of each group and FIG. 7D shows bioluminescence (p/s) of individual mice over time. Wt and ZBTB32 KO CART cells were injected at the dose of 0.4×10⁶ CAR+ cells per mouse on day 9 (indicated by a dotted line). PBS treated tumors grow out of compliance on day 23. Arrowheads in panel D indicate relapsed tumors in wt CART treated mice. A star in panel D indicates one mouse treated with ZBTB32 KO CART showing stable bioluminescence signal but no tumor.

[0151] FIGS. 8A-8D depict expression of T cell transcription factors in wt CART cells and ZBTB32KO CART cells. FIGS. 8A and 8B show flow cytometry analyses of TCF7 levels in total CART and CD8 CART cells in the blood samples. FIGS. 8C and 8D show Eomes levels in total CART and CD8 CART cells in the blood samples. WT, ZBTB32KO gRNA6 and ZBTB32KO gRNA7 CART cells were injected at the dose of 1×10⁶ CAR+ cells per mouse on day 10. Blood samples were collected at 4 and 5 weeks post CART injection. Solid bars indicate the median of each group at each time point. *: P<0.05, ***: P<0.001, ****: P<0.0001 by one-way ANOVA.

[0152] FIGS. 9A-9C shows flow cytometry analysis of total CART cells (FIG. 9A), CD4+ CART cells (FIG. 9B) and CD8+ CART cell (FIG. 9C) numbers per ul of blood. WT, ZBTB32KO gRNA6 and ZBTB32KO gRNA7 CART cells were injected at the dose of 1×10⁶ CAR+ cells per mouse on day 10. Blood samples were collected at 2 and 3 weeks post CART injection. Solid bars indicate the median of each group at each time point.

[0153] FIGS. 10A-10F show flow cytometry analyses of cytokines. FIGS. 10A and 10D show IL2 positive CD4 and CD8 CART cell numbers per ul of blood. FIGS. 10B and 10E show IFNg positive CD4 and CD8 CART cell numbers per ul of blood. FIGS. 10C and 10F show TNFαpositive CD4 and CD8 CART cell numbers per ul of blood. WT, ZBTB32KO gRNA6 and ZBTB32KO gRNA7 CART cells were injected at the dose of 1×10⁶ CAR+ cells per mouse on day 10. Blood samples were collected at 3 and 5 weeks post CART injection. Solid bars indicate the median of each group at each time point.

[0154] FIGS. 11A-11D show flow cytometry analyses of cell surface PD1 (FIGS. 11A and B) and TIM3 (FIGS. 11C and 11D) levels in CART cells in the blood samples. WT, ZBTB32KO gRNA6 and ZBTB32KO gRNA7 CART cells were injected at the dose of 1×10⁶ CAR+ cells per mouse on day 10. Blood samples were collected at 3 weeks post CART injection. Solid bars indicate the median level of each group. **: P<0.01, ***: P<0.001, ****: P<0.0001 by one-way ANOVA. MFI: Median Fluorescence Intensity.

[0155] FIGS. 12A-12C depict the number of CART cells in the spleen of tumor free mice. WT, ZBTB32KO gRNA6 and ZBTB32KO gRNA7 CART cells were injected at the dose of 1×10⁶ CAR+ cells per mouse on day 10. At day 53, CART cells were isolated from spleens of 14-15 tumor free mice. 4-5 spleens in the same group were pooled and the number of total CART cells per spleen was calculated. FIG. 12A shows the total number of CART cells. FIG. 12B shows the total number of CD4+ CART cells. FIG. 12C shows the total number of CD8+ CART cells. Data are presented as Mean±SEM.

[0156] FIGS. 13A-13C depict flow cytometry analyses of TCF7 (FIG. 13A), Eomes (FIG. 13B) and TOX (FIG. 13C) levels in CART cells in the blood samples. WT and ZBTB32KO gRNA6 CART cells were injected at the dose of 0.4×10⁶ CAR+ cells per mouse on day 9. Blood samples were collected at 20 days post CART injection. *: P<0.05, **: P<0.01, ***: P<0.001 by t-test. MFI: Median Fluorescence Intensity. Solid bars indicate the median of each group.

[0157] FIGS. 14A-14F show flow cytometry analyses of cell surface PD1, TIM3 and LAG3. FIGS. 14A and 14D show PD1 levels in CART cells in the blood samples. FIGS. 14B and 14E show TIM3 levels in CART cells in the blood samples. FIGS. 14C and 14F show LAG 3 levels in CART cells in the blood samples. WT and ZBTB32KO gRNA6 CART cells were injected at the dose of 0.4×10⁶ CAR+ cells per mouse on day 9. Blood samples were collected at 20 days post CART injection. *: P<0.05, **: P<0.01, ***: P<0.001, ****: P<0.0001 by t-test. MFI: Median Fluorescence Intensity. Solid bars indicate the median of each group.

[0158] FIGS. 15A-15C shows cell growth for control and ZBTB32 KO TMD8 cells. FIG. 15A shows the in vitro proliferation of control TMD8 cells (gRNA NT) and ZBTB32 KO TMD8 cells. FIGS. 15B-15C show the in vivo tumor growth of control TMD8 cells (gRNA NT) and ZBTB32 KO TMD8 cells. Individual (FIG. 15B) and mean (FIG. 15C) tumor growth kinetics for each cohort of mice over time are shown.

### DETAILED DESCRIPTION

[0159] The disclosures herein are based, at least in part, on the discoveries of the effects of ZBTB32 inhibition on immune cells and cancer cells. Without wishing to be bound by theory, it is believed that in some embodiments, inhibition of ZBTB32 can enhance T cell-mediated anti-tumor response. In certain embodiments, inhition of ZBTB32 enhances CART cell activity, e.g., cell expansion, cytokine production, persistence, resistance to exhaustion, and anti-tumor activity in vivo. In other embodiments, inhibition of ZBTB32 reduces cancer cell growth in vitro and in vivo.

[0160] Accordingly, the disclosures herein include, but are not limited to, methods of increasing the therapeutic efficacy of CAR-expressing cells, and methods of manufacturing CAR-expressing cells, using ZBTB32 inhibitors. Related CAR-expressing cells, therapies, nucleic acids, vectors, and compositions are also disclosed. The disclosures herein also include, but are not limited to, methods of treating cancer, methods of increasing the efficacy of other therapeutic agents or modalities, and methods of increasing immune responses, using ZBTB32 inhibitors.

### Definitions

[0161] Unless defined otherwise, all technical and scientific terms used herein have the same meaning as commonly understood by one of ordinary skill in the art to which the disclosure pertains.

[0162] The term “a” and “an” refers to one or to more than one (i.e., to at least one) of the grammatical object of the article. By way of example, “an element” means one element or more than one element.

[0163] The term “about” when referring to a measurable value such as an amount, a temporal duration, and the like, is meant to encompass variations of ±20% or in some instances ±10%, or in some instances ±5%, or in some instances ±1%, or in some instances ±0.1% from the specified value, as such variations are appropriate to perform the disclosed methods.

[0164] The term “Chimeric Antigen Receptor” or alternatively a “CAR” refers to a recombinant polypeptide construct comprising at least an extracellular antigen binding domain, a transmembrane domain and a cytoplasmic signaling domain (also referred to herein as “an intracellular signaling domain”) comprising a functional signaling domain derived from a stimulatory molecule as defined below. In some embodiments, the domains in the CAR polypeptide construct are in the same polypeptide chain, e.g., comprise a chimeric fusion protein. In some embodiments, the domains in the CAR polypeptide construct are not contiguous with each other, e.g., are in different polypeptide chains, e.g., as provided in an RCAR as described herein. In some embodiments, the terms “CAR” and “CAR molecule” are used interchangeably.

[0165] In some embodiments, the cytoplasmic signaling domain comprises a primary signaling domain (e.g., a primary signaling domain of CD3-zeta). In some embodiments, the cytoplasmic signaling domain further comprises one or more functional signaling domains derived from at least one costimulatory molecule as defined below. In some embodiments, the costimulatory molecule is chosen from 41BB (i.e., CD137), CD27, ICOS, and/or CD28. In some embodiments, the CAR molecule comprises a chimeric fusion protein comprising an extracellular antigen recognition domain, a transmembrane domain and an intracellular signaling domain comprising a functional signaling domain derived from a stimulatory molecule. In some embodiments, the CAR molecule comprises a chimeric fusion protein comprising an extracellular antigen recognition domain, a transmembrane domain and an intracellular signaling domain comprising a functional signaling domain derived from a co-stimulatory molecule and a functional signaling domain derived from a stimulatory molecule. In some embodiments, the CAR molecule comprises a chimeric fusion protein comprising an extracellular antigen recognition domain, a transmembrane domain and an intracellular signaling domain comprising two functional signaling domains derived from one or more co-stimulatory molecule(s) and a functional signaling domain derived from a stimulatory molecule. In some embodiments, the CAR molecule comprises a chimeric fusion protein comprising an extracellular antigen recognition domain, a transmembrane domain and an intracellular signaling domain comprising at least two functional signaling domains derived from one or more co-stimulatory molecule(s) and a functional signaling domain derived from a stimulatory molecule. In some embodiments, the CAR molecule comprises an optional leader sequence at the amino-terminus (N-ter) of the CAR fusion protein. In some embodiments, the CAR molecule further comprises a leader sequence at the N-terminus of the extracellular antigen recognition domain, wherein the leader sequence is optionally cleaved from the antigen recognition domain (e.g., an scFv) during cellular processing and localization of the CAR molecule to the cellular membrane.

[0166] A CAR molecule that comprises an antigen binding domain (e.g., an scFv, a single domain antibody, or TCR (e.g., a TCR alpha binding domain or TCR beta binding domain)) that targets a specific tumor marker X, wherein X can be a tumor marker as described herein, is also referred to as XCAR. For example, a CAR molecule that comprises an antigen binding domain that targets CD19 is referred to as CD19CAR. The CAR molecule can be expressed in any cell, e.g., an immune effector cell as described herein (e.g., a T cell or an NK cell).

[0167] The term “signaling domain” refers to the functional portion of a protein which acts by transmitting information within the cell to regulate cellular activity via defined signaling pathways by generating second messengers or functioning as effectors by responding to such messengers.

[0168] The term “antibody,” as used herein, refers to a protein, or polypeptide sequence derived from an immunoglobulin molecule, which specifically binds with an antigen. Antibodies can be polyclonal or monoclonal, multiple or single chain, or intact immunoglobulins, and may be derived from natural sources or from recombinant sources. Antibodies can be tetramers of immunoglobulin molecules.

[0169] The term “antibody fragment” refers to at least one portion of an intact antibody, or recombinant variants thereof, and refers to the antigen binding domain, e.g., an antigenic determining variable region of an intact antibody, that is sufficient to confer recognition and specific binding of the antibody fragment to a target, such as an antigen. Examples of antibody fragments include, but are not limited to, Fab, Fab′, F(ab′)2, and FIT fragments, scFv antibody fragments, linear antibodies, single domain antibodies such as sdAb (either VL or VH), camelid VHH domains, and multi-specific molecules formed from antibody fragments such as a bivalent fragment comprising two or more, e.g., two, Fab fragments linked by a disulfide bridge at the hinge region, or two or more, e.g., two isolated CDR or other epitope binding fragments of an antibody linked. An antibody fragment can also be incorporated into single domain antibodies, maxibodies, minibodies, nanobodies, intrabodies, diabodies, triabodies, tetrabodies, v-NAR and bis-scFv (see, e.g., Hollinger and Hudson, Nature Biotechnology 23:1126-1136, 2005). Antibody fragments can also be grafted into scaffolds based on polypeptides such as a fibronectin type III (Fn3) (see U.S. Pat. No. 6,703,199, which describes fibronectin polypeptide minibodies).

[0170] The term “scFv” refers to a fusion protein comprising at least one antibody fragment comprising a variable region of a light chain and at least one antibody fragment comprising a variable region of a heavy chain, wherein the light and heavy chain variable regions are contiguously linked via a short flexible polypeptide linker, and capable of being expressed as a single chain polypeptide, and wherein the scFv retains the specificity of the intact antibody from which it is derived. Unless specified, as used herein an scFv may have the VL and VH variable regions in either order, e.g., with respect to the N-terminal and C-terminal ends of the polypeptide, the scFv may comprise VL-linker-VH or may comprise VH-linker-VL.

[0171] The terms “complementarity determining region” or “CDR,” as used herein, refer to the sequences of amino acids within antibody variable regions which confer antigen specificity and binding affinity. For example, in general, there are three CDRs in each heavy chain variable region (e.g., HCDR1, HCDR2, and HCDR3) and three CDRs in each light chain variable region (LCDR1, LCDR2, and LCDR3). The precise amino acid sequence boundaries of a given CDR can be determined using any of a number of well-known schemes, including those described by Kabat et al. (1991), “Sequences of Proteins of Immunological Interest,” 5th Ed. Public Health Service, National Institutes of Health, Bethesda, MD (“Kabat” numbering scheme), A1-Lazikani et al., (1997) JMB 273,927-948 (“Chothia” numbering scheme), or a combination thereof. Under the Kabat numbering scheme, in some embodiments, the CDR amino acid residues in the heavy chain variable domain (VH) are numbered 31-(HCDR1), 50-65 (HCDR2), and 95-102 (HCDR3); and the CDR amino acid residues in the light chain variable domain (VL) are numbered 24-34 (LCDR1), 50-56 (LCDR2), and 89-97 (LCDR3). Under the Chothia numbering scheme, in some embodiments, the CDR amino acids in the VH are numbered 26-32 (HCDR1), 52-56 (HCDR2), and 95-102 (HCDR3); and the CDR amino acid residues in the VL are numbered 26-32 (LCDR1), 50-52 (LCDR2), and 91-96 (LCDR3). In a combined Kabat and Chothia numbering scheme, in some embodiments, the CDRs correspond to the amino acid residues that are part of a Kabat CDR, a Chothia CDR, or both. For instance, in some embodiments, the CDRs correspond to amino acid residues 26-35 (HCDR1), 50-65 (HCDR2), and 95-102 (HCDR3) in a VH, e.g., a mammalian VH, e.g., a human VH; and amino acid residues 24-34 (LCDR1), 50-56 (LCDR2), and 89-97 (LCDR3) in a VL, e.g., a mammalian VL, e.g., a human VL.

[0172] The portion of the CAR composition of the disclosure comprising an antibody or antibody fragment thereof may exist in a variety of forms, for example, where the antigen binding domain is expressed as part of a polypeptide chain including, for example, a single domain antibody fragment (sdAb), a single chain antibody (scFv), or e.g., a humanized antibody (Harlow et al., 1999, In: Using Antibodies: A Laboratory Manual, Cold Spring Harbor Laboratory Press, NY; Harlow et al., 1989, In: Antibodies: A Laboratory Manual, Cold Spring Harbor, New York; Houston et al., 1988, Proc. Natl. Acad. Sci. USA 85:5879-5883; Bird et al., 1988, Science 242:423-426). In some embodiments, the antigen binding domain of a CAR composition of the disclosure comprises an antibody fragment. In some embodiments, the CAR molecule comprises an antibody fragment that comprises an scFv.

[0173] As used herein, the term “binding domain” or “antibody molecule” (also referred to herein as “anti-target binding domain”) refers to a protein, e.g., an immunoglobulin chain or fragment thereof, comprising at least one immunoglobulin variable domain sequence. The term “binding domain” or “antibody molecule” encompasses antibodies and antibody fragments. In some embodiments, an antibody molecule is a multispecific antibody molecule, e.g., it comprises a plurality of immunoglobulin variable domain sequences, wherein a first immunoglobulin variable domain sequence of the plurality has binding specificity for a first epitope and a second immunoglobulin variable domain sequence of the plurality has binding specificity for a second epitope. In some embodiments, a multispecific antibody molecule is a bispecific antibody molecule. A bispecific antibody has specificity for no more than two antigens. A bispecific antibody molecule is characterized by a first immunoglobulin variable domain sequence which has binding specificity for a first epitope and a second immunoglobulin variable domain sequence that has binding specificity for a second epitope. The term “antibody heavy chain,” refers to the larger of the two types of polypeptide chains present in antibody molecules in their naturally occurring conformations, and which normally determines the class to which the antibody belongs.

[0174] The term “antibody light chain,” refers to the smaller of the two types of polypeptide chains present in antibody molecules in their naturally occurring conformations. Kappa (κ) and lambda (λ) light chains refer to the two major antibody light chain isotypes.

[0175] The term “recombinant antibody” refers to an antibody which is generated using recombinant DNA technology, such as, for example, an antibody expressed by a bacteriophage or yeast expression system. The term should also be construed to mean an antibody which has been generated by the synthesis of a DNA molecule encoding the antibody and which DNA molecule expresses an antibody protein, or an amino acid sequence specifying the antibody, wherein the DNA or amino acid sequence has been obtained using recombinant DNA or amino acid sequence technology which is available and well known in the art.

[0176] The term “antigen” or “Ag” refers to a molecule that provokes an immune response. This immune response may involve either antibody production, or the activation of specific immunologically competent cells, or both. The skilled artisan will understand that any macromolecule, including virtually all proteins or peptides, can serve as an antigen. Furthermore, antigens can be derived from recombinant or genomic DNA. A skilled artisan will understand that any DNA, which comprises a nucleotide sequences or a partial nucleotide sequence encoding a protein that elicits an immune response therefore encodes an “antigen” as that term is used herein. Furthermore, one skilled in the art will understand that an antigen need not be encoded solely by a full-length nucleotide sequence of a gene. It is readily apparent that the present disclosure includes, but is not limited to, the use of partial nucleotide sequences of more than one gene and that these nucleotide sequences are arranged in various combinations to encode polypeptides that elicit the desired immune response. Moreover, a skilled artisan will understand that an antigen need not be encoded by a “gene” at all. It is readily apparent that an antigen can be generated synthesized or can be derived from a biological sample, or might be macromolecule besides a polypeptide. Such a biological sample can include, but is not limited to a tissue sample, a tumor sample, a cell or a fluid with other biological components.

[0177] The term “anti-tumor effect” refers to a biological effect which can be manifested by various means, including but not limited to, e.g., a decrease in tumor volume, a decrease in the number of tumor cells, a decrease in the number of metastases, an increase in life expectancy, decrease in tumor cell proliferation, decrease in tumor cell survival, or amelioration of various physiological symptoms associated with the cancerous condition. An “anti-tumor effect” can also be manifested by the ability of the peptides, polynucleotides, cells and antibodies of the disclosure in prevention of the occurrence of tumor in the first place.

[0178] The term “anti-cancer effect” refers to a biological effect which can be manifested by various means, including but not limited to, e.g., a decrease in tumor volume, a decrease in the number of cancer cells, a decrease in the number of metastases, an increase in life expectancy, decrease in cancer cell proliferation, decrease in cancer cell survival, or amelioration of various physiological symptoms associated with the cancerous condition. An “anti-cancer effect” can also be manifested by the ability of the peptides, polynucleotides, cells and antibodies in prevention of the occurrence of cancer in the first place. The term “anti-tumor effect” refers to a biological effect which can be manifested by various means, including but not limited to, e.g., a decrease in tumor volume, a decrease in the number of tumor cells, a decrease in tumor cell proliferation, or a decrease in tumor cell survival. The term “autologous” refers to any material derived from the same individual to whom it is later to be re-introduced into the individual.

[0179] The term “allogeneic” refers to any material derived from a different animal of the same species as the individual to whom the material is introduced. Two or more individuals are said to be allogeneic to one another when the genes at one or more loci are not identical. In some embodiments, allogeneic material from individuals of the same species may be sufficiently unlike genetically to interact antigenically.

[0180] The term “xenogeneic” refers to a graft derived from an animal of a different species.

[0181] The term “apheresis” as used herein refers to the art-recognized extracorporeal process by which the blood of a donor or patient is removed from the donor or patient and passed through an apparatus that separates out selected particular constituent(s) and returns the remainder to the circulation of the donor or patient, e.g., by retransfusion. Thus, in the context of “an apheresis sample” refers to a sample obtained using apheresis.

[0182] The term “combination” refers to either a fixed combination in one dosage unit form, or a combined administration where a compound of the present disclosure and a combination partner (e.g. another drug as explained below, also referred to as “therapeutic agent” or “co-agent”) may be administered independently at the same time or separately within time intervals, especially where these time intervals allow that the combination partners show a cooperative, e.g. synergistic effect. The single components may be packaged in a kit or separately. One or both of the components (e.g., powders or liquids) may be reconstituted or diluted to a desired dose prior to administration. The terms “co-administration” or “combined administration” or the like as utilized herein are meant to encompass administration of the selected combination partner to a single subject in need thereof (e.g. a patient), and are intended to include treatment regimens in which the agents are not necessarily administered by the same route of administration or at the same time. The term “pharmaceutical combination” as used herein means a product that results from the mixing or combining of more than one active ingredient and includes both fixed and non-fixed combinations of the active ingredients. The term “fixed combination” means that the active ingredients, e.g. a compound of the present disclosure and a combination partner, are both administered to a patient simultaneously in the form of a single entity or dosage. The term “non-fixed combination” means that the active ingredients, e.g. a compound of the present disclosure and a combination partner, are both administered to a patient as separate entities either simultaneously, concurrently or sequentially with no specific time limits, wherein such administration provides therapeutically effective levels of the two compounds in the body of the patient. The latter also applies to cocktail therapy, e.g. the administration of three or more active ingredients.

[0183] By “a combination” or “in combination with,” it is not intended to imply that the therapy or the therapeutic agents must be administered at the same time and/or formulated for delivery together, although these methods of delivery are within the scope described herein. The therapeutic agents in the combination can be administered concurrently with, prior to, or subsequent to, one or more other additional therapies or therapeutic agents. The therapeutic agents or therapeutic protocol can be administered in any order. In general, each agent will be administered at a dose and/or on a time schedule determined for that agent. In will further be appreciated that the additional therapeutic agent utilized in this combination may be administered together in a single composition or administered separately in different compositions. In general, it is expected that additional therapeutic agents utilized in combination be utilized at levels that do not exceed the levels at which they are utilized individually. In some embodiments, the levels utilized in combination will be lower than those utilized individually.

[0184] In embodiments, the additional therapeutic agent is administered at a therapeutic or lower-than therapeutic dose. In certain embodiments, the concentration of the second therapeutic agent that is required to achieve inhibition, e.g., growth inhibition, is lower when the second therapeutic agent is administered in combination with the first therapeutic agent, than when the second therapeutic agent is administered individually. In certain embodiments, the concentration of the first therapeutic agent that is required to achieve inhibition, e.g., growth inhibition, is lower when the first therapeutic agent is administered in combination with the second therapeutic agent than when the first therapeutic agent is administered individually. In certain embodiments, in a combination therapy, the concentration of the second therapeutic agent that is required to achieve inhibition, e.g., growth inhibition, is lower than the therapeutic dose of the second therapeutic agent as a monotherapy, e.g., 10-20%, 20-30%, 30-40%, 40-50%, 50-60%, 60-70%, 70-80%, or 80-90% lower. In certain embodiments, in a combination therapy, the concentration of the first therapeutic agent that is required to achieve inhibition, e.g., growth inhibition, is lower than the therapeutic dose of the first therapeutic agent as a monotherapy, e.g., 10-20%, 20-30%, 30-40%, 40-50%, 50-60%, 60-70%, 70-80%, or 80-90% lower.

[0185] The term “inhibition,” “inhibitor,” or “antagonist” includes a reduction in a certain parameter, e.g., an activity, of a given molecule. For example, inhibition of an activity of at least 5%, 10%, 20%, 30%, 40%, 50%, 60%, 70%, 80%, 90%, 95%, 98%, 99%, or more is included by this term. Thus, inhibition need not be 100%.

[0186] The term “activation,” “activator,” or “agonist” includes an increase in a certain parameter, e.g., an activity, of a given molecule. For example, increase of an activity of at least 5%, 10%, 20%, 30%, 40%, 50%, 60%, 70%, 80%, 90%, or more, or at least 1, 2, 3, 4, 5, 6, 7, 8, 9, 10-fold, or more, is included by this term.

[0187] The term “cancer” refers to a disease characterized by the rapid and uncontrolled growth of aberrant cells. Cancer cells can spread locally or through the bloodstream and lymphatic system to other parts of the body. Examples of various cancers are described herein and include but are not limited to, breast cancer, prostate cancer, ovarian cancer, cervical cancer, skin cancer, pancreatic cancer, colorectal cancer, renal cancer, liver cancer, brain cancer, lymphoma, leukemia, lung cancer and the like. Preferred cancers treated by the methods described herein include multiple myeloma, Hodgkin's lymphoma or non-Hodgkin's lymphoma.

[0188] The terms “tumor” and “cancer” are used interchangeably herein, e.g., both terms encompass solid and liquid, e.g., diffuse or circulating, tumors. As used herein, the term “cancer” or “tumor” includes premalignant, as well as malignant cancers and tumors.

[0189] “Derived from” as that term is used herein, indicates a relationship between a first and a second molecule. It generally refers to structural similarity between the first molecule and a second molecule and does not connote or include a process or source limitation on a first molecule that is derived from a second molecule. For example, in the case of an intracellular signaling domain that is derived from a CD3zeta molecule, the intracellular signaling domain retains sufficient CD3zeta structure such that is has the required function, namely, the ability to generate a signal under the appropriate conditions. It does not connote or include a limitation to a particular process of producing the intracellular signaling domain, e.g., it does not mean that, to provide the intracellular signaling domain, one must start with a CD3zeta sequence and delete unwanted sequence, or impose mutations, to arrive at the intracellular signaling domain.

[0190] The phrase “disease associated with expression of an antigen, e.g., a tumor antigen” includes, but is not limited to, a disease associated with a cell which expresses the antigen (e.g., wild-type or mutant antigen) or condition associated with a cell which expresses the antigen (e.g., wild-type or mutant antigen) including, e.g., proliferative diseases such as a cancer or malignancy or a precancerous condition such as a myelodysplasia, a myelodysplastic syndrome or a preleukemia; or a noncancer related indication associated with a cell which expresses the antigen (e.g., wild-type or mutant antigen). For the avoidance of doubt, a disease associated with expression of the antigen may include a condition associated with a cell which does not presently express the antigen, e.g., because expression of the antigen has been downregulated, e.g., due to treatment with a molecule targeting the antigen, but which at one time expressed the antigen. In some embodiments, the disease associated with expression of an antigen, e.g., a tumor antigen is a cancer (e.g., a solid cancer or a hematological cancer), a viral infection (e.g., HIV, a fungal infection, e.g., C. neoformans), an autoimmune disease (e.g. rheumatoid arthritis, system lupus erythematosus (SLE or lupus), pemphigus vulgaris, and Sjogren's syndrome; inflammatory bowel disease, ulcerative colitis; transplant-related allospecific immunity disorders related to mucosal immunity; and unwanted immune responses towards biologics (e.g., Factor VIII) where humoral immunity is important).

[0191] The term “conservative sequence modifications” refers to amino acid modifications that do not significantly affect or alter the binding characteristics of the antibody or antibody fragment containing the amino acid sequence. Such conservative modifications include amino acid substitutions, additions and deletions. Modifications can be introduced into an antibody or antibody fragment of the disclosure by standard techniques known in the art, such as site-directed mutagenesis and PCR-mediated mutagenesis. Conservative substitutions are ones in which the amino acid residue is replaced with an amino acid residue having a similar side chain. Families of amino acid residues having similar side chains have been defined in the art. These families include amino acids with basic side chains (e.g., lysine, arginine, histidine), acidic side chains (e.g., aspartic acid, glutamic acid), uncharged polar side chains (e.g., glycine, asparagine, glutamine, serine, threonine, tyrosine, cysteine, tryptophan), nonpolar side chains (e.g., alanine, valine, leucine, isoleucine, proline, phenylalanine, methionine), beta-branched side chains (e.g., threonine, valine, isoleucine) and aromatic side chains (e.g., tyrosine, phenylalanine, tryptophan, histidine). Thus, one or more amino acid residues within a CAR molecule of the disclosure can be replaced with other amino acid residues from the same side chain family and the altered CAR molecule can be tested using the functional assays described herein.

[0192] The term “stimulation,” refers to a primary response induced by binding of a stimulatory molecule (e.g., a TCR/CD3 complex) with its cognate ligand thereby mediating a signal transduction event, such as, but not limited to, signal transduction via the TCR/CD3 complex. Stimulation can mediate altered expression of certain molecules, such as downregulation of TGF-β, and/or reorganization of cytoskeletal structures, and the like.

[0193] The term “stimulatory molecule,” refers to a molecule expressed by a T cell that provides the primary cytoplasmic signaling sequence(s) that regulate primary activation of the TCR complex in a stimulatory way for at least some aspect of the T cell signaling pathway. In some embodiments, the ITAM-containing domain within the CAR molecule recapitulates the signaling of the primary TCR independently of endogenous TCR complexes. In some embodiments, the primary signal is initiated by, for instance, binding of a TCR/CD3 complex with an MHC molecule loaded with peptide, and which leads to mediation of a T cell response, including, but not limited to, proliferation, activation, differentiation, and the like. A primary cytoplasmic signaling sequence (also referred to as a “primary signaling domain”) that acts in a stimulatory manner may contain a signaling motif which is known as immunoreceptor tyrosine-based activation motif or ITAM. Examples of an ITAM containing primary cytoplasmic signaling sequence that is of particular use in the disclosure includes, but is not limited to, those derived from TCR zeta, FcR gamma, FcR beta, CD3 gamma, CD3 delta, CD3 epsilon, CD5, CD22, CD79a, CD79b, CD278 (also known as “ICOS”), FcεRI and CD66d, DAP10 and DAP12. In a specific CAR molecule of the disclosure, the intracellular signaling domain in any one or more CAR molecules of the disclosure comprises an intracellular signaling sequence, e.g., a primary signaling sequence of CD3-zeta. The term “antigen presenting cell” or “APC” refers to an immune system cell such as an accessory cell (e.g., a B-cell, a dendritic cell, and the like) that displays a foreign antigen complexed with major histocompatibility complexes (MHC's) on its surface. T-cells may recognize these complexes using their T-cell receptors (TCRs). APCs process antigens and present them to T-cells.

[0194] An “intracellular signaling domain,” as the term is used herein, refers to an intracellular portion of a molecule. In embodiments, the intracellular signal domain transduces the effector function signal and directs the cell to perform a specialized function. While the entire intracellular signaling domain can be employed, in many cases it is not necessary to use the entire chain. To the extent that a truncated portion of the intracellular signaling domain is used, such truncated portion may be used in place of the intact chain as long as it transduces the effector function signal. The term intracellular signaling domain is thus meant to include any truncated portion of the intracellular signaling domain sufficient to transduce the effector function signal.

[0195] The intracellular signaling domain generates a signal that promotes an immune effector function of the CAR containing cell, e.g., a CART cell. Examples of immune effector function, e.g., in a CART cell, include cytolytic activity and helper activity, including the secretion of cytokines.

[0196] In some embodiments, the intracellular signaling domain can comprise a primary intracellular signaling domain. Exemplary primary intracellular signaling domains include those derived from the molecules responsible for primary stimulation, or antigen dependent simulation. In some embodiments, the intracellular signaling domain can comprise a costimulatory intracellular domain. Exemplary costimulatory intracellular signaling domains include those derived from molecules responsible for costimulatory signals, or antigen independent stimulation. For example, in the case of a CART, a primary intracellular signaling domain can comprise a cytoplasmic sequence of a T cell receptor, and a costimulatory intracellular signaling domain can comprise cytoplasmic sequence from co-receptor or costimulatory molecule.

[0197] A primary intracellular signaling domain can comprise a signaling motif which is known as an immunoreceptor tyrosine-based activation motif or ITAM. Examples of ITAM containing primary cytoplasmic signaling sequences include, but are not limited to, those derived from CD3 zeta, FcR gamma, FcR beta, CD3 gamma, CD3 delta, CD3 epsilon, CD5, CD22, CD79a, CD79b, CD278 (also known as “ICOS”), FcεRI, CD66d, DAP10 and DAP12.

[0198] The term “zeta” or alternatively “zeta chain”, “CD3-zeta” or “TCR-zeta” refers to CD247. Swiss-Prot accession number P20963 provides exemplary human CD3 zeta amino acid sequences. A “zeta stimulatory domain” or alternatively a “CD3-zeta stimulatory domain” or a “TCR-zeta stimulatory domain” refers to a stimulatory domain of CD3-zeta or a variant thereof (e.g., a molecule having mutations, e.g., point mutations, fragments, insertions, or deletions). In some embodiments, the cytoplasmic domain of zeta comprises residues 52 through 164 of GenBank Acc. No. BAG36664.1 or a variant thereof (e.g., a molecule having mutations, e.g., point mutations, fragments, insertions, or deletions). In some embodiments, the “zeta stimulatory domain” or a “CD3-zeta stimulatory domain” is the sequence provided as SEQ ID NO: 1034 or 1037 or a variant thereof (e.g., a molecule having mutations, e.g., point mutations, fragments, insertions, or deletions).

[0199] The term “costimulatory molecule” refers to the cognate binding partner on a T cell that specifically binds with a costimulatory ligand, thereby mediating a costimulatory response by the T cell, such as, but not limited to, proliferation. Costimulatory molecules are cell surface molecules other than antigen receptors or their ligands that are required for an efficient immune response. Costimulatory molecules include, but are not limited to an MHC class I molecule, TNF receptor proteins, Immunoglobulin-like proteins, cytokine receptors, integrins, signaling lymphocytic activation molecules (SLAM proteins), activating NK cell receptors, BTLA, Toll ligand receptor, OX40, CD2, CD7, CD27, CD28, CD30, CD40, CDS, ICAM-1, LFA-1 (CD11a/CD18), 4-1BB (CD137), B7-H3, CDS, ICAM-1, ICOS (CD278), GITR, BAFFR, LIGHT, HVEM (LIGHTR), KIRDS2, SLAMF7, NKp80 (KLRF1), NKp44, NKp30, NKp46, CD19, CD4, CD8alpha, CD8beta, IL2R beta, IL2R gamma, IL7R alpha, ITGA4, VLA1, CD49a, ITGA4, IA4, CD49D, ITGA6, VLA-6, CD49f, ITGAD, CD11d, ITGAE, CD103, ITGAL, CD11a, LFA-1, ITGAM, CD11b, ITGAX, CD11c, ITGB1, CD29, ITGB2, CD18, LFA-1, ITGB7, NKG2D, NKG2C, TNFR2, TRANCE/RANKL, DNAM1 (CD226), SLAMF4 (CD244, 2B4), CD84, CD96 (Tactile), CEACAM1, CRTAM, Ly9 (CD229), CD160 (BY55), PSGL1, CD100 (SEMA4D), CD69, SLAMF6 (NTB-A, Ly108), SLAM (SLAMF1, CD150, IPO-3), BLAME (SLAMF8), SELPLG (CD162), LTBR, LAT, GADS, SLP-76, PAG/Cbp, CD19a, CD28-OX40, CD28-4-1BB, and a ligand that specifically binds with CD83.

[0200] A costimulatory intracellular signaling domain refers to the intracellular portion of a costimulatory molecule.

[0201] The intracellular signaling domain can comprise the entire intracellular portion, or the entire native intracellular signaling domain, of the molecule from which it is derived, or a functional fragment thereof.

[0202] The term “4-1BB” refers to CD137 or Tumor necrosis factor receptor superfamily member 9. Swiss-Prot accession number P20963 provides exemplary human 4-1BB amino acid sequences. A “4-1BB costimulatory domain” refers to a costimulatory domain of 4-1BB, or a variant thereof (e.g., a molecule having mutations, e.g., point mutations, fragments, insertions, or deletions). In some embodiments, the “4-1BB costimulatory domain” is the sequence provided as SEQ ID NO: 1029 or a variant thereof (e.g., a molecule having mutations, e.g., point mutations, fragments, insertions, or deletions).

[0203] “Immune effector cell,” as that term is used herein, refers to a cell that is involved in an immune response, e.g., in the promotion of an immune effector response. Examples of immune effector cells include T cells, e.g., alpha/beta T cells and gamma/delta T cells, B cells, natural killer (NK) cells, natural killer T (NKT) cells, mast cells, and myeloid-derived phagocytes.

[0204] “Immune effector function or immune effector response,” as that term is used herein, refers to function or response, e.g., of an immune effector cell, that enhances or promotes an immune attack of a target cell. E.g., an immune effector function or response refers a property of a T or NK cell that promotes killing or the inhibition of growth or proliferation, of a target cell. In the case of a T cell, primary stimulation and co-stimulation are examples of immune effector function or response.

[0205] The term “effector function” refers to a specialized function of a cell. Effector function of a T cell, for example, may be cytolytic activity or helper activity including the secretion of cytokines.

[0206] The term “encoding” refers to the inherent property of specific sequences of nucleotides in a polynucleotide, such as a gene, a cDNA, or an mRNA, to serve as templates for synthesis of other polymers and macromolecules in biological processes having either a defined sequence of nucleotides (e.g., rRNA, tRNA and mRNA) or a defined sequence of amino acids and the biological properties resulting therefrom. Thus, a gene, cDNA, or RNA, encodes a protein if transcription and translation of mRNA corresponding to that gene produces the protein in a cell or other biological system. Both the coding strand, the nucleotide sequence of which is identical to the mRNA sequence and is usually provided in sequence listings, and the non-coding strand, used as the template for transcription of a gene or cDNA, can be referred to as encoding the protein or other product of that gene or cDNA.

[0207] Unless otherwise specified, a “nucleotide sequence encoding an amino acid sequence” includes all nucleotide sequences that are degenerate versions of each other and that encode the same amino acid sequence. The phrase nucleotide sequence that encodes a protein or a RNA may also include introns to the extent that the nucleotide sequence encoding the protein may in some version contain an intron(s).

[0208] The term “effective amount” or “therapeutically effective amount” are used interchangeably herein, and refer to an amount of a compound, formulation, material, or composition, as described herein effective to achieve a particular biological result.

[0209] The term “endogenous” refers to any material from or produced inside an organism, cell, tissue or system.

[0210] The term “exogenous” refers to any material introduced from or produced outside an organism, cell, tissue or system.

[0211] The term “expression” refers to the transcription and/or translation of a particular nucleotide sequence. In some embodiments, expression comprises translation of an mRNA introduced into a cell.

[0212] The term “transfer vector” refers to a composition of matter which comprises an isolated nucleic acid and which can be used to deliver the isolated nucleic acid to the interior of a cell. Numerous vectors are known in the art including, but not limited to, linear polynucleotides, polynucleotides associated with ionic or amphiphilic compounds, plasmids, and viruses. Thus, the term “transfer vector” includes an autonomously replicating plasmid or a virus. The term should also be construed to further include non-plasmid and non-viral compounds which facilitate transfer of nucleic acid into cells, such as, for example, a polylysine compound, liposome, and the like. Examples of viral transfer vectors include, but are not limited to, adenoviral vectors, adeno-associated virus vectors, retroviral vectors, lentiviral vectors, and the like.

[0213] The term “expression vector” refers to a vector comprising a recombinant polynucleotide comprising expression control sequences operatively linked to a nucleotide sequence to be expressed. An expression vector comprises sufficient cis-acting elements for expression; other elements for expression can be supplied by the host cell or in an in vitro expression system. Expression vectors include all those known in the art, including cosmids, plasmids (e.g., naked or contained in liposomes) and viruses (e.g., lentiviruses, retroviruses, adenoviruses, and adeno-associated viruses) that incorporate the recombinant polynucleotide.

[0214] The term “lentivirus” refers to a genus of the Retroviridae family. Lentiviruses are unique among the retroviruses in being able to infect non-dividing cells; they can deliver a significant amount of genetic information into the DNA of the host cell, so they are one of the most efficient methods of a gene delivery vector. HIV, SIV, and FIV are all examples of lentiviruses.

[0215] The term “lentiviral vector” refers to a vector derived from at least a portion of a lentivirus genome, including especially a self-inactivating lentiviral vector as provided in Milone et al., Mol. Ther. 17(8): 1453-1464 (2009). Other examples of lentivirus vectors that may be used in the clinic, include but are not limited to, e.g., the LENTIVECTOR® gene delivery technology from Oxford BioMedica, the LENTIMAX™ vector system from Lentigen and the like. Nonclinical types of lentiviral vectors are also available and would be known to one skilled in the art.

[0216] The term “homologous” or “identity” refers to the subunit sequence identity between two polymeric molecules, e.g., between two nucleic acid molecules, such as, two DNA molecules or two RNA molecules, or between two polypeptide molecules. When a subunit position in both of the two molecules is occupied by the same monomeric subunit; e.g., if a position in each of two DNA molecules is occupied by adenine, then they are homologous or identical at that position. The homology between two sequences is a direct function of the number of matching or homologous positions; e.g., if half (e.g., five positions in a polymer ten subunits in length) of the positions in two sequences are homologous, the two sequences are 50% homologous; if 90% of the positions (e.g., 9 of 10), are matched or homologous, the two sequences are 90% homologous.

[0217] “Humanized” forms of non-human (e.g., murine) antibodies are chimeric immunoglobulins, immunoglobulin chains or fragments thereof (such as Fv, Fab, Fab′, F(ab′)2 or other antigen-binding subsequences of antibodies) which contain minimal sequence derived from non-human immunoglobulin. For the most part, humanized antibodies and antibody fragments thereof are human immunoglobulins (recipient antibody or antibody fragment) in which residues from a complementarity-determining region (CDR) of the recipient are replaced by residues from a CDR of a non-human species (donor antibody) such as mouse, rat or rabbit having the desired specificity, affinity, and capacity. In some instances, Fv framework region (FR) residues of the human immunoglobulin are replaced by corresponding non-human residues. Furthermore, a humanized antibody/antibody fragment can comprise residues which are found neither in the recipient antibody nor in the imported CDR or framework sequences. These modifications can further refine and optimize antibody or antibody fragment performance. In general, the humanized antibody or antibody fragment thereof will comprise substantially all of at least one, and typically two, variable domains, in which all or substantially all of the CDR regions correspond to those of a non-human immunoglobulin and all or a significant portion of the FR regions are those of a human immunoglobulin sequence. The humanized antibody or antibody fragment can also comprise at least a portion of an immunoglobulin constant region (Fc), typically that of a human immunoglobulin. For further details, see Jones et al., Nature, 321: 522-525, 1986; Reichmann et al., Nature, 332: 323-329, 1988; Presta, Curr. Op. Struct. Biol., 2: 593-596, 1992.

[0218] “Fully human” refers to an immunoglobulin, such as an antibody or antibody fragment, where the whole molecule is of human origin or consists of an amino acid sequence identical to a human form of the antibody or immunoglobulin.

[0219] The term “isolated” means altered or removed from the natural state. For example, a nucleic acid or a peptide naturally present in a living animal is not “isolated,” but the same nucleic acid or peptide partially or completely separated from the coexisting materials of its natural state is “isolated.” An isolated nucleic acid or protein can exist in substantially purified form, or can exist in a non-native environment such as, for example, a host cell.

[0220] In the context of the present disclosure, the following abbreviations for the commonly occurring nucleic acid bases are used. “A” refers to adenosine, “C” refers to cytosine, “G” refers to guanosine, “T” refers to thymidine, and “U” refers to uridine.

[0221] The term “operably linked” or “transcriptional control” refers to functional linkage between a regulatory sequence and a heterologous nucleic acid sequence resulting in expression of the latter. For example, a first nucleic acid sequence is operably linked with a second nucleic acid sequence when the first nucleic acid sequence is placed in a functional relationship with the second nucleic acid sequence. For instance, a promoter is operably linked to a coding sequence if the promoter affects the transcription or expression of the coding sequence. Operably linked DNA sequences can be contiguous with each other and, e.g., where necessary to join two protein coding regions, are in the same reading frame.

[0222] The term “parenteral” administration of an immunogenic composition includes, e.g., subcutaneous (s.c.), intravenous (i.v.), intramuscular (i.m.), or intrasternal injection, intratumoral, or infusion techniques.

[0223] The term “nucleic acid” or “polynucleotide” refers to deoxyribonucleic acids (DNA) or ribonucleic acids (RNA) and polymers thereof in either single- or double-stranded form. Unless specifically limited, the term encompasses nucleic acids containing known analogues of natural nucleotides that have similar binding properties as the reference nucleic acid and are metabolized in a manner similar to naturally occurring nucleotides. Unless otherwise indicated, a particular nucleic acid sequence also implicitly encompasses conservatively modified variants thereof (e.g., degenerate codon substitutions, e.g., conservative substitutions), alleles, orthologs, SNPs, and complementary sequences as well as the sequence explicitly indicated. Specifically, degenerate codon substitutions, e.g., conservative substitutions may be achieved by generating sequences in which the third position of one or more selected (or all) codons is substituted with mixed-base and/or deoxyinosine residues (Batzer et al., Nucleic Acid Res. 19:5081 (1991); Ohtsuka et al., J. Biol. Chem. 260:2605-2608 (1985); and Rossolini et al., Mol. Cell. Probes 8:91-98 (1994)).

[0224] The terms “peptide,” “polypeptide,” and “protein” are used interchangeably, and refer to a molecule comprised of amino acid residues covalently linked by peptide bonds. A protein or peptide must contain at least two amino acids, and no limitation is placed on the maximum number of amino acids that can comprise a protein's or peptide's sequence. Polypeptides include any peptide or protein comprising two or more amino acids joined to each other by peptide bonds. As used herein, the term refers to both short chains, which also commonly are referred to in the art as peptides, oligopeptides and oligomers, for example, and to longer chains, which generally are referred to in the art as proteins, of which there are many types. “Polypeptides” include, for example, biologically active fragments, substantially homologous polypeptides, oligopeptides, homodimers, heterodimers, variants of polypeptides, modified polypeptides, derivatives, analogs, fusion proteins, among others. A polypeptide includes a natural peptide, a recombinant peptide, or a combination thereof.

[0225] The term “promoter” refers to a DNA sequence recognized by the synthetic machinery of the cell, or introduced synthetic machinery, required to initiate the specific transcription of a polynucleotide sequence.

[0226] The term “promoter/regulatory sequence” refers to a nucleic acid sequence which is required for expression of a gene product operably linked to the promoter/regulatory sequence. In some instances, this sequence may be the core promoter sequence and in other instances, this sequence may also include an enhancer sequence and other regulatory elements which are required for expression of the gene product. The promoter/regulatory sequence may, for example, be one which expresses the gene product in a tissue specific manner.

[0227] The term “constitutive” promoter refers to a nucleotide sequence which, when operably linked with a polynucleotide which encodes or specifies a gene product, causes the gene product to be produced in a cell under most or all physiological conditions of the cell.

[0228] The term “inducible” promoter refers to a nucleotide sequence which, when operably linked with a polynucleotide which encodes or specifies a gene product, causes the gene product to be produced in a cell substantially only when an inducer which corresponds to the promoter is present in the cell.

[0229] The term “tissue-specific” promoter refers to a nucleotide sequence which, when operably linked with a polynucleotide encodes or specified by a gene, causes the gene product to be produced in a cell substantially only if the cell is a cell of the tissue type corresponding to the promoter.

[0230] The terms “cancer associated antigen” or “tumor antigen” interchangeably refers to a molecule (typically a protein, carbohydrate or lipid) that is expressed on the surface of a cancer cell, either entirely or as a fragment (e.g., MHC/peptide), and which is useful for the preferential targeting of a pharmacological agent to the cancer cell. In some embodiments, a tumor antigen is a marker expressed by both normal cells and cancer cells, e.g., a lineage marker, e.g., CD19 on B cells. In some embodiments, a tumor antigen is a cell surface molecule that is overexpressed in a cancer cell in comparison to a normal cell, for instance, 1-fold over expression, 2-fold overexpression, 3-fold overexpression or more in comparison to a normal cell. In some embodiments, a tumor antigen is a cell surface molecule that is inappropriately synthesized in the cancer cell, for instance, a molecule that contains deletions, additions or mutations in comparison to the molecule expressed on a normal cell. In some embodiments, a tumor antigen will be expressed exclusively on the cell surface of a cancer cell, entirely or as a fragment (e.g., MHC/peptide), and not synthesized or expressed on the surface of a normal cell. In some embodiments, the CAR molecules of the present disclosure include CAR molecules comprising an antigen binding domain (e.g., antibody or antibody fragment) that binds to a MHC presented peptide. Normally, peptides derived from endogenous proteins fill the pockets of Major histocompatibility complex (MHC) class I molecules, and are recognized by T cell receptors (TCRs) on CD8+ T lymphocytes. The MHC class I complexes are constitutively expressed by all nucleated cells. In cancer, virus-specific and/or tumor-specific peptide/MHC complexes represent a unique class of cell surface targets for immunotherapy. TCR-like antibodies targeting peptides derived from viral or tumor antigens in the context of human leukocyte antigen (HLA)-A1 or HLA-A2 have been described (see, e.g., Sastry et al., J Virol. 2011 85(5):1935-1942; Sergeeva et al., Blood, 2011 117(16):4262-4272; Verma et al., J Immunol 2010 184(4):2156-2165; Willemsen et al., Gene Ther 2001 8(21):1601-1608; Dao et al., Sci Transl Med 2013 5(176):176ra33; Tassev et al., Cancer Gene Ther 2012 19(2):84-100). For example, TCR-like antibody can be identified from screening a library, such as a human scFv phage displayed library.

[0231] The term “tumor-supporting antigen” or “cancer-supporting antigen” interchangeably refer to a molecule (typically a protein, carbohydrate or lipid) that is expressed on the surface of a cell that is, itself, not cancerous, but supports the cancer cells, e.g., by promoting their growth or survival e.g., resistance to immune cells. Exemplary cells of this type include stromal cells and myeloid-derived suppressor cells (MDSCs). The tumor-supporting antigen itself need not play a role in supporting the tumor cells so long as the antigen is present on a cell that supports cancer cells.

[0232] The term “flexible polypeptide linker” or “linker” as used in the context of an scFv refers to a peptide linker that consists of amino acids such as glycine and/or serine residues used alone or in combination, to link variable heavy and variable light chain regions together. In some embodiments, the flexible polypeptide linker is a Gly/Ser linker and comprises the amino acid sequence (Gly-Gly-Gly-Ser)n, where n is a positive integer equal to or greater than 1. For example, n=1, n=2, n=3, n=4, n=5 and n=6, n=7, n=8, n=9 and n=10 (SEQ ID NO: 1009). In some embodiments, the flexible polypeptide linkers include, but are not limited to, (Gly4 Ser)4 (SEQ ID NO: 1010) or (Gly4 Ser)3 (SEQ ID NO: 1011). In some embodiments, the linkers include multiple repeats of (Gly2Ser), (GlySer) or (Gly3 Ser) (SEQ ID NO: 1012). Also included within the scope of the disclosure are linkers described in WO2012/138475, incorporated herein by reference.

[0233] As used herein, a 5′ cap (also termed an RNA cap, an RNA 7-methylguanosine cap or an RNA m7G cap) is a modified guanine nucleotide that has been added to the “front” or 5′ end of a eukaryotic messenger RNA shortly after the start of transcription. The 5′ cap consists of a terminal group which is linked to the first transcribed nucleotide. Its presence is critical for recognition by the ribosome and protection from RNases. Cap addition is coupled to transcription, and occurs co-transcriptionally, such that each influences the other. Shortly after the start of transcription, the 5′ end of the mRNA being synthesized is bound by a cap-synthesizing complex associated with RNA polymerase. This enzymatic complex catalyzes the chemical reactions that are required for mRNA capping. Synthesis proceeds as a multi-step biochemical reaction. The capping moiety can be modified to modulate functionality of mRNA such as its stability or efficiency of translation.

[0234] As used herein, “in vitro transcribed RNA” refers to RNA, preferably mRNA, that has been synthesized in vitro. Generally, the in vitro transcribed RNA is generated from an in vitro transcription vector. The in vitro transcription vector comprises a template that is used to generate the in vitro transcribed RNA.

[0235] As used herein, a “poly(A)” is a series of adenosines attached by polyadenylation to the mRNA. In some embodiments of a construct for transient expression, the polyA is between 50 and 5000 (SEQ ID NO: 1013), preferably greater than 64, more preferably greater than 100, most preferably greater than 300 or 400. poly(A) sequences can be modified chemically or enzymatically to modulate mRNA functionality such as localization, stability or efficiency of translation.

[0236] As used herein, “polyadenylation” refers to the covalent linkage of a polyadenylyl moiety, or its modified variant, to a messenger RNA molecule. In eukaryotic organisms, most messenger RNA (mRNA) molecules are polyadenylated at the 3′ end. The 3′ poly(A) tail is a long sequence of adenine nucleotides (often several hundred) added to the pre-mRNA through the action of an enzyme, polyadenylate polymerase. In higher eukaryotes, the poly(A) tail is added onto transcripts that contain a specific sequence, the polyadenylation signal. The poly(A) tail and the protein bound to it aid in protecting mRNA from degradation by exonucleases. Polyadenylation is also important for transcription termination, export of the mRNA from the nucleus, and translation. Polyadenylation occurs in the nucleus immediately after transcription of DNA into RNA, but additionally can also occur later in the cytoplasm. After transcription has been terminated, the mRNA chain is cleaved through the action of an endonuclease complex associated with RNA polymerase. The cleavage site is usually characterized by the presence of the base sequence AAUAAA near the cleavage site. After the mRNA has been cleaved, adenosine residues are added to the free 3′ end at the cleavage site.

[0237] As used herein, “transient” refers to expression of a non-integrated transgene for a period of hours, days or weeks, wherein the period of time of expression is less than the period of time for expression of the gene if integrated into the genome or contained within a stable plasmid replicon in the host cell.

[0238] As used herein, the terms “treat”, “treatment” and “treating” refer to the reduction or amelioration of the progression, severity and/or duration of a proliferative disorder, or the amelioration of one or more symptoms (preferably, one or more discernible symptoms) of a proliferative disorder resulting from the administration of one or more therapies (e.g., one or more therapeutic agents of the disclosure). In specific embodiments, the terms “treat”, “treatment” and “treating” refer to the amelioration of at least one measurable physical parameter of a proliferative disorder, such as growth of a tumor, not necessarily discernible by the patient. In other embodiments the terms “treat”, “treatment” and “treating”-refer to the inhibition of the progression of a proliferative disorder, either physically by, e.g., stabilization of a discernible symptom, physiologically by, e.g., stabilization of a physical parameter, or both. In other embodiments, the terms “treat”, “treatment” and “treating” refer to the reduction or stabilization of tumor size or cancerous cell count.

[0239] The term “signal transduction pathway” refers to the biochemical relationship between a variety of signal transduction molecules that play a role in the transmission of a signal from one portion of a cell to another portion of a cell. The phrase “cell surface receptor” includes molecules and complexes of molecules capable of receiving a signal and transmitting signal across the membrane of a cell.

[0240] The term “subject” is intended to include living organisms in which an immune response can be elicited (e.g., mammals, human).

[0241] The term, a “substantially purified” cell refers to a cell that is essentially free of other cell types. A substantially purified cell also refers to a cell which has been separated from other cell types with which it is normally associated in its naturally occurring state. In some instances, a population of substantially purified cells refers to a homogenous population of cells. In other instances, this term refers simply to cell that have been separated from the cells with which they are naturally associated in their natural state. In some embodiments, the cells are cultured in vitro. In other embodiments, the cells are not cultured in vitro.

[0242] The term “therapeutic” as used herein means a treatment. A therapeutic effect is obtained by reduction, suppression, remission, or eradication of a disease state.

[0243] The term “prophylaxis” as used herein means the prevention of or protective treatment for a disease or disease state.

[0244] In the context of the present disclosure, “tumor antigen” or “hyperproliferative disorder antigen” or “antigen associated with a hyperproliferative disorder” refers to antigens that are common to specific hyperproliferative disorders. In certain embodiments, the hyperproliferative disorder antigens of the present disclosure are derived from, cancers including but not limited to primary or metastatic melanoma, thymoma, lymphoma, sarcoma, lung cancer, liver cancer, non-Hodgkin lymphoma, Hodgkin lymphoma, leukemias, uterine cancer, cervical cancer, bladder cancer, kidney cancer and adenocarcinomas such as breast cancer, prostate cancer (e.g., castrate-resistant or therapy-resistant prostate cancer, or metastatic prostate cancer), ovarian cancer, pancreatic cancer, and the like, or a plasma cell proliferative disorder, e.g., asymptomatic myeloma (smoldering multiple myeloma or indolent myeloma), monoclonal gammapathy of undetermined significance (MGUS), Waldenstrom's macroglobulinemia, plasmacytomas (e.g., plasma cell dyscrasia, solitary myeloma, solitary plasmacytoma, extramedullary plasmacytoma, and multiple plasmacytoma), systemic amyloid light chain amyloidosis, and POEMS syndrome (also known as Crow-Fukase syndrome, Takatsuki disease, and PEP syndrome).

[0245] The term “transfected” or “transformed” or “transduced” refers to a process by which exogenous nucleic acid is transferred or introduced into the host cell. A “transfected” or “transformed” or “transduced” cell is one which has been transfected, transformed or transduced with exogenous nucleic acid. The cell includes the primary subject cell and its progeny.

[0246] The term “specifically binds,” refers to an antibody, or a ligand, which recognizes and binds with a cognate binding partner (e.g., a stimulatory and/or costimulatory molecule present on a T cell) protein present in a sample, but which antibody or ligand does not substantially recognize or bind other molecules in the sample.

[0247] “Regulatable chimeric antigen receptor (RCAR),” as used herein, refers to a set of polypeptides, typically two in the simplest embodiments, which when in an immune effector cell, provides the cell with specificity for a target cell, typically a cancer cell, and with intracellular signal generation. In some embodiments, an RCAR comprises at least an extracellular antigen binding domain, a transmembrane domain and a cytoplasmic signaling domain (also referred to herein as “an intracellular signaling domain”) comprising a functional signaling domain derived from a stimulatory molecule and/or costimulatory molecule as defined herein in the context of a CAR molecule. In some embodiments, the set of polypeptides in the RCAR are not contiguous with each other, e.g., are in different polypeptide chains. In some embodiments, the RCAR includes a dimerization switch that, upon the presence of a dimerization molecule, can couple the polypeptides to one another, e.g., can couple an antigen binding domain to an intracellular signaling domain. In some embodiments, the RCAR is expressed in a cell (e.g., an immune effector cell) as described herein, e.g., an RCAR-expressing cell (also referred to herein as “RCARX cell”). In some embodiments, the RCARX cell is a T cell, and is referred to as a RCART cell. In some embodiments, the RCARX cell is an NK cell, and is referred to as a RCARN cell. The RCAR can provide the RCAR-expressing cell with specificity for a target cell, typically a cancer cell, and with regulatable intracellular signal generation or proliferation, which can optimize an immune effector property of the RCAR-expressing cell. In embodiments, an RCAR cell relies at least in part, on an antigen binding domain to provide specificity to a target cell that comprises the antigen bound by the antigen binding domain.

[0248] “Membrane anchor” or “membrane tethering domain”, as that term is used herein, refers to a polypeptide or moiety, e.g., a myristoyl group, sufficient to anchor an extracellular or intracellular domain to the plasma membrane.

[0249] “Switch domain,” as that term is used herein, e.g., when referring to an RCAR, refers to an entity, typically a polypeptide-based entity, that, in the presence of a dimerization molecule, associates with another switch domain. The association results in a functional coupling of a first entity linked to, e.g., fused to, a first switch domain, and a second entity linked to, e.g., fused to, a second switch domain. A first and second switch domain are collectively referred to as a dimerization switch. In embodiments, the first and second switch domains are the same as one another, e.g., they are polypeptides having the same primary amino acid sequence, and are referred to collectively as a homodimerization switch. In embodiments, the first and second switch domains are different from one another, e.g., they are polypeptides having different primary amino acid sequences, and are referred to collectively as a heterodimerization switch. In embodiments, the switch is intracellular. In embodiments, the switch is extracellular. In embodiments, the switch domain is a polypeptide-based entity, e.g., FKBP or FRB-based, and the dimerization molecule is small molecule, e.g., a rapalogue. In embodiments, the switch domain is a polypeptide-based entity, e.g., an scFv that binds a myc peptide, and the dimerization molecule is a polypeptide, a fragment thereof, or a multimer of a polypeptide, e.g., a myc ligand or multimers of a myc ligand that bind to one or more myc scFvs. In embodiments, the switch domain is a polypeptide-based entity, e.g., myc receptor, and the dimerization molecule is an antibody or fragments thereof, e.g., myc antibody.

[0250] “Dimerization molecule,” as that term is used herein, e.g., when referring to an RCAR, refers to a molecule that promotes the association of a first switch domain with a second switch domain. In embodiments, the dimerization molecule does not naturally occur in the subject, or does not occur in concentrations that would result in significant dimerization. In embodiments, the dimerization molecule is a small molecule, e.g., rapamycin or a rapalogue, e.g., RAD001.

[0251] The term “bioequivalent” refers to an amount of an agent other than the reference compound (e.g., RAD001), required to produce an effect equivalent to the effect produced by the reference dose or reference amount of the reference compound (e.g., RAD001). In some embodiments, the effect is the level of mTOR inhibition, e.g., as measured by P70 S6 kinase inhibition, e.g., as evaluated in an in vivo or in vitro assay, e.g., as measured by an assay described herein, e.g., the Boulay assay, or measurement of phosphorylated S6 levels by western blot. In some embodiments, the effect is alteration of the ratio of PD-1 positive/PD-1 negative T cells, as measured by cell sorting. In some embodiments, a bioequivalent amount or dose of an mTOR inhibitor is the amount or dose that achieves the same level of P70 S6 kinase inhibition as does the reference dose or reference amount of a reference compound. In some embodiments, a bioequivalent amount or dose of an mTOR inhibitor is the amount or dose that achieves the same level of alteration in the ratio of PD-1 positive/PD-1 negative T cells as does the reference dose or reference amount of a reference compound.

[0252] The term “low, immune enhancing, dose” when used in conjunction with an mTOR inhibitor, e.g., an allosteric mTOR inhibitor, e.g., RAD001 or rapamycin, or a catalytic mTOR inhibitor, refers to a dose of mTOR inhibitor that partially, but not fully, inhibits mTOR activity, e.g., as measured by the inhibition of P70 S6 kinase activity. Methods for evaluating mTOR activity, e.g., by inhibition of P70 S6 kinase, are discussed herein. The dose is insufficient to result in complete immune suppression but is sufficient to enhance the immune response. In some embodiments, the low, immune enhancing, dose of mTOR inhibitor results in a decrease in the number of PD-1 positive immune effector cells, e.g., T cells or NK cells, and/or an increase in the number of PD-1 negative immune effector cells, e.g., T cells or NK cells, or an increase in the ratio of PD-1 negative immune effector cells (e.g., T cells or NK cells)/PD-1 positive immune effector cells (e.g., T cells or NK cells).

[0253] In some embodiments, the low, immune enhancing, dose of mTOR inhibitor results in an increase in the number of naive T cells. In some embodiments, the low, immune enhancing, dose of mTOR inhibitor results in one or more of the following:
[0254] an increase in the expression of one or more of the following markers: CD62Lhigh, CD127high, CD27+, and BCL2, e.g., on memory T cells, e.g., memory T cell precursors;
[0255] a decrease in the expression of KLRG1, e.g., on memory T cells, e.g., memory T cell precursors; and
[0256] an increase in the number of memory T cell precursors, e.g., cells with any one or combination of the following characteristics: increased CD62Lhigh, increased CD127high, increased CD27+, decreased KLRG1, and increased BCL2;
[0257] wherein any of the changes described above occurs, e.g., at least transiently, e.g., as compared to a non-treated subject.

[0258] “Refractory” as used herein refers to a disease, e.g., cancer, that does not respond to a treatment. In embodiments, a refractory cancer can be resistant to a treatment before or at the beginning of the treatment. In other embodiments, the refractory cancer can become resistant during a treatment. A refractory cancer is also called a resistant cancer.

[0259] “Relapsed” or a “relapse” as used herein refers to the reappearance of a disease (e.g., cancer) or the signs and symptoms of a disease such as cancer after a period of improvement or responsiveness, e.g., after prior treatment of a therapy, e.g., cancer therapy. For example, the period of responsiveness may involve the level of cancer cells falling below a certain threshold, e.g., below 20%, 15%, 10%, 5%, 4%, 3%, 2%, or 1%. The reappearance may involve the level of cancer cells rising above a certain threshold, e.g., above 20%, 15%, 10%, 5%, 4%, 3%, 2%, or 1%.

[0260] In some embodiments, a “responder” of a therapy can be a subject having complete response, very good partial response, or partial response after receiving the therapy. In some embodiments, a “non-responder” of a therapy can be a subject having minor response, stable disease, or progressive disease after receiving the therapy. In some embodiments, the subject has multiple myeloma and the response of the subject to a multiple myeloma therapy is determined based on IMWG 2016 criteria, e.g., as disclosed in Kumar, et al., Lancet Oncol. 17, e328-346 (2016), hereby incorporated herein by reference in its entirety.

[0261] Ranges: throughout this disclosure, various embodiments of the disclosure can be presented in a range format. It should be understood that the description in range format is merely for convenience and brevity and should not be construed as an inflexible limitation on the scope of the disclosure. Accordingly, the description of a range should be considered to have specifically disclosed all the possible subranges as well as individual numerical values within that range. For example, description of a range such as from 1 to 6 should be considered to have specifically disclosed subranges such as from 1 to 3, from 1 to 4, from 1 to 5, from 2 to 4, from 2 to 6, from 3 to 6 etc., as well as individual numbers within that range, for example, 1, 2, 2.7, 3, 4, 5, 5.3, and 6. As another example, a range such as 95-99% identity, includes something with 95%, 96%, 97%, 98% or 99% identity, and includes subranges such as 96-99%, 96-98%, 96-97%, 97-99%, 97-98% and 98-99% identity. This applies regardless of the breadth of the range.

[0262] A “gene editing system” as the term is used herein, refers to a system, e.g., one or more molecules, that direct and effect an alteration, e.g., a deletion, of one or more nucleic acids at or near a site of genomic DNA targeted by said system. Gene editing systems are known in the art, and are described more fully below.

[0263] The term “cognate antigen molecule” refers to any antigen described herein. In some embodiments, it refers to an antigen bound, e.g., recognized or targeted, by a CAR polypeptide, e.g., any target CAR molecule described herein. In some embodiments, it refers to a cancer associated antigen described herein. In some embodiments, the cognate antigen molecule is a recombinant molecule.

[0264] In the groups, radicals, or moieties defined herein, the number of carbon atoms is often specified preceding the group, for example, (C₁-C₁₀)alkyl means an alkyl group or radical having 1 to 10 carbon atoms. In general, for groups comprising two or more subgroups, the last named group is the radical attachment point, for example, “alkylaryl” means a monovalent radical of the formula alkyl-aryl-, while “arylalkyl” means a monovalent radical of the formula aryl-alkyl-. Furthermore, the use of a term designating a monovalent radical where a divalent radical is appropriate shall be construed to designate the respective divalent radical and vice versa. Unless otherwise specified, conventional definitions of terms control and conventional stable atom valences are presumed and achieved in all formulas and groups. The articles “a” and “an” refer to one or more than one (e.g., to at least one) of the grammatical object of the article. By way of example, “an element” means one element or more than one element.

[0265] The term “and/or” means either “and” or “or” unless indicated otherwise.

[0266] The term “optionally substituted” means that a given chemical moiety (e.g., an alkyl group) can (but is not required to) be bonded other substituents (e.g., heteroatoms). For instance, an alkyl group that is optionally substituted can be a fully saturated alkyl chain (e.g., a pure hydrocarbon). Alternatively, the same optionally substituted alkyl group can have substituents different from hydrogen. For instance, it can, at any point along the chain be bounded to a halogen atom, a hydroxyl group, or any other substituent described herein. Thus, the term “optionally substituted” means that a given chemical moiety has the potential to contain other functional groups, but does not necessarily have any further functional groups. Suitable substituents used in the optional substitution of the described groups include, without limitation, halogen, oxo, —OH, —CN, —COOH, —CH₂CN, —O—(C₁-C₆)alkyl, (C₁-C₆)alkyl, (C₁-C₆)alkoxy, (C₁-C₆)haloalkyl, (C₁-C₆)haloalkoxy, —O—(C₂-C₆)alkenyl, —O—(C₂-C₆)alkynyl, (C₂-C₆)alkenyl, (C₂-C₆)alkynyl, —OH, —OP(O)(OH)₂, —OC(O)(C₁-C₆)alkyl, —C(O)(C₁-C₆)alkyl, —OC(O)O(C₁-C₆)alkyl, —NH₂, —NH((C₁-C₆)alkyl), —N((C₁-C₆)alkyl)₂, —NHC(O)(C₁-C₆)alkyl, —C(O)NH(C₁-C₆)alkyl, —S(O)₂(C₁-C₆)alkyl, —S(O)NH(C₁-C₆)alkyl, and S(O)N((C₁-C₆)alkyl)₂. The substituents can themselves be optionally substituted. “Optionally substituted” as used herein also refers to substituted or unsubstituted whose meaning is described below.

[0267] The term “substituted” means that the specified group or moiety bears one or more suitable substituents wherein the substituents may connect to the specified group or moiety at one or more positions. For example, an aryl substituted with a cycloalkyl may indicate that the cycloalkyl connects to one atom of the aryl with a bond or by fusing with the aryl and sharing two or more common atoms.

[0268] The term “unsubstituted” means that the specified group bears no substituents.

[0269] Unless otherwise specifically defined, “aryl” means a cyclic, aromatic hydrocarbon group having 1 to 3 aromatic rings, including monocyclic or bicyclic groups such as phenyl, biphenyl, or naphthyl. When containing two aromatic rings (bicyclic, etc.), the aromatic rings of the aryl group are optionally joined at a single point (e.g., biphenyl), or fused (e.g., naphthyl). The aryl group is optionally substituted by one or more substituents, e.g., 1 to 5 substituents, at any point of attachment. Exemplary substituents include, but are not limited to, —H, -halogen, —CN, —O—(C₁-C₆)alkyl, (C₁-C₆)alkyl, —O—(C₂-C₆)alkenyl, —O—(C₂-C₆)alkynyl, (C₂-C₆)alkenyl, (C₂-C₆)alkynyl, —OH, —OP(O)(OH)₂, —OC(O)(C₁-C₆)alkyl, —C(O)(C₁-C₆)alkyl, —OC(O)O(C₁-C₆) alkyl, NH₂, NH((C₁-C₆)alkyl), N((C₁-C₆)alkyl)₂, —S(O)₂—(C₁-C₆)alkyl, —S(O)NH(C₁-C₆)alkyl, and S(O)N((C₁-C₆)alkyl)₂. The substituents are themselves optionally substituted. Furthermore, when containing two fused rings, the aryl groups optionally have an unsaturated or partially saturated ring fused with a fully saturated ring. Exemplary ring systems of these aryl groups include, but are not limited to, phenyl, biphenyl, naphthyl, anthracenyl, phenalenyl, phenanthrenyl, indanyl, indenyl, tetrahydronaphthalenyl, tetrahydrobenzoannulenyl, and the like.

[0270] Unless otherwise specifically defined, “heteroaryl” means a monovalent monocyclic aromatic radical of 5 to 24 ring atoms or a polycyclic aromatic radical, containing one or more ring heteroatoms selected from N, O, or S, the remaining ring atoms being C. Heteroaryl as herein defined also means a bicyclic heteroaromatic group wherein the heteroatom is selected from N, O, or S. The aromatic radical is optionally substituted independently with one or more substituents described herein. Examples include, but are not limited to, furyl, thienyl, pyrrolyl, pyridyl, pyrazolyl, pyrimidinyl, imidazolyl, isoxazolyl, oxazolyl, oxadiazolyl, pyrazinyl, indolyl, thiophen-2-yl, quinolyl, benzopyranyl, isothiazolyl, thiazolyl, thiadiazole, indazole, benzimidazolyl, thieno[3,2-b]thiophene, triazolyl, triazinyl, imidazo[1,2-b]pyrazolyl, furo[2,3-c]pyridinyl, imidazo[1,2-a]pyridinyl, indazolyl, pyrrolo[2,3-c]pyridinyl, pyrrolo[3,2-c]pyridinyl, pyrazolo[3,4-c]pyridinyl, thieno[3,2-c]pyridinyl, thieno[2,3-c]pyridinyl, thieno[2,3-b]pyridinyl, benzothiazolyl, indolyl, indolinyl, indolinonyl, dihydrobenzothiophenyl, dihydrobenzofuranyl, benzofuran, chromanyl, thiochromanyl, tetrahydroquinolinyl, dihydrobenzothiazine, dihydrobenzoxanyl, quinolinyl, isoquinolinyl, 1,6-naphthyridinyl, benzo[de]isoquinolinyl, pyrido[4,3-b][1,6]naphthyridinyl, thieno[2,3-b]pyrazinyl, quinazolinyl, tetrazolo[1,5-a]pyridinyl, [1,2,4]triazolo[4,3-a]pyridinyl, isoindolyl, pyrrolo[2,3-b]pyridinyl, pyrrolo[3,4-b]pyridinyl, pyrrolo[3,2-b]pyridinyl, imidazo[5,4-b]pyridinyl, pyrrolo[1,2-a]pyrimidinyl, tetrahydropyrrolo[1,2-a]pyrimidinyl, 3,4-dihydro-2H-1A²-pyrrolo[2,1-b]pyrimidine, dibenzo[b,d]thiophene, pyridin-2-one, furo[3,2-c]pyridinyl, furo[2,3-c]pyridinyl, 1H-pyrido[3,4-b][1,4]thiazinyl, benzooxazolyl, benzoisoxazolyl, furo[2,3-b]pyridinyl, benzothiophenyl, 1,5-naphthyridinyl, furo[3,2-b]pyridine, [1,2,4]triazolo[1,5-a]pyridinyl, benzo[1,2,3]triazolyl, imidazo[1,2-a]pyrimidinyl, [1,2,4]triazolo[4,3-b]pyridazinyl, benzo[c][1,2,5]thiadiazolyl, benzo[c][1,2,5]oxadiazole, 1,3-dihydro-2H-benzo[d]imidazol-2-one, 3,4-dihydro-2H-pyrazolo[1,5-b][1,2]oxazinyl, 4,5,6,7-tetrahydropyrazolo[1,5-a]pyridinyl, thiazolo[5,4 d]thiazolyl, imidazo[2,1-b][1,3,4]thiadiazolyl, thieno[2,3-b]pyrrolyl, 3H-indolyl, and derivatives thereof. Furthermore, when containing two fused rings the aryl groups herein defined may have an unsaturated or partially saturated ring fused with a fully saturated ring. Exemplary ring systems of these heteroaryl groups include indolinyl, indolinonyl, dihydrobenzothiophenyl, dihydrobenzofuran, chromanyl, thiochromanyl, tetrahydroquinolinyl, dihydrobenzothiazine,3,4-dihydro-1H-isoquinolinyl, 2,3-dihydrobenzofuran, indolinyl, indolyl, and dihydrobenzoxanyl.

[0271] Halogen or “halo” mean fluorine, chlorine, bromine, or iodine.

[0272] “Alkyl” means a straight or branched chain saturated hydrocarbon containing 1-12 carbon atoms. Examples of a (C₁-C₆)alkyl group include, but are not limited to, methyl, ethyl, propyl, butyl, pentyl, hexyl, isopropyl, isobutyl, sec-butyl, tert-butyl, isopentyl, neopentyl, and isohexyl.

[0273] “Alkoxy” means a straight or branched chain saturated hydrocarbon containing 1-12 carbon atoms containing a terminal “0” in the chain, e.g., —O(alkyl). Examples of alkoxy groups include, without limitation, methoxy, ethoxy, propoxy, butoxy, t-butoxy, or pentoxy groups.

[0274] “Alkenyl” means a straight or branched chain unsaturated hydrocarbon containing 2-12 carbon atoms. The “alkenyl” group contains at least one double bond in the chain. The double bond of an alkenyl group can be unconjugated or conjugated to another unsaturated group. Examples of alkenyl groups include ethenyl, propenyl, n-butenyl, iso-butenyl, pentenyl, or hexenyl. An alkenyl group can be unsubstituted or substituted and may be straight or branched.

[0275] “Alkynyl” means a straight or branched chain unsaturated hydrocarbon containing 2-12 carbon atoms. The “alkynyl” group contains at least one triple bond in the chain. Examples of alkenyl groups include ethynyl, propargyl, n-butynyl, iso-butynyl, pentynyl, or hexynyl. An alkynyl group can be unsubstituted or substituted.

[0276] “Alkylene” or “alkylenyl” means a divalent alkyl radical. Any of the above mentioned monovalent alkyl groups may be an alkylene by abstraction of a second hydrogen atom from the alkyl. As herein defined, alkylene may also be a (C₁-C₆)alkylene. An alkylene may further be a (C₁-C₄)alkylene. Typical alkylene groups include, but are not limited to, —CH₂—, —CH(CH₃)—, —C(CH₃)₂-, —CH₂CH₂—, —CH₂CH(CH₃)—, —CH₂C(CH₃)₂-, —CH₂CH₂CH₂—, —CH₂CH₂CH₂CH—, and the like.

[0277] “Cycloalkyl” or “carbocyclyl” means a monocyclic or polycyclic saturated or partially unsaturated carbon ring containing 3-18 carbon atoms and wherein there is not delocalized n electrons (aromaticity) shared among the ring carbons. Examples of cycloalkyl groups include, without limitations, cyclopropyl, cyclobutyl, cyclopentyl, cyclohexyl, cycloheptanyl, cyclooctanyl, norboranyl, norborenyl, bicyclo[2.2.2]octanyl, or bicyclo[2.2.2]octenyl and derivatives thereof. A (C₃-C₈)cycloalkyl is a cycloalkyl group containing between 3 and 8 carbon atoms. A cycloalkyl group can be fused (e.g., decalin) or bridged (e.g., norbomane).

[0278] “Heterocyclyl” or “heterocycloalkyl” means a saturated or partially saturated monocyclic or polycyclic ring containing carbon and at least one heteroatom selected from oxygen, nitrogen, or sulfur (O, N, or S) and wherein there is not delocalized n electrons (aromaticity) shared among the ring carbons or heteroatoms. The heterocycloalkyl ring structure may be substituted by one or more substituents. The substituents can themselves be optionally substituted. Examples of heterocyclyl rings include, but are not limited to, oxetanyl, azetadinyl, tetrahydrofuranyl, tetrahydropyranyl, pyrrolidinyl, oxazolinyl, oxazolidinyl, thiazolinyl, thiazolidinyl, pyranyl, thiopyranyl, tetrahydropyranyl, dioxalinyl, piperidinyl, morpholinyl, thiomorpholinyl, thiomorpholinyl S-oxide, thiomorpholinyl S-dioxide, piperazinyl, azepinyl, oxepinyl, diazepinyl, tropanyl, oxazolidinonyl, 1,4-dioxanyl, dihydrofuranyl, 1,3-dioxolanyl, imidazolidinyl, imidazolinyl, dithiolanyl, and homotropanyl.

[0279] “Hydroxyalkyl” means an alkyl group substituted with one or more —OH groups. Examples of hydroxyalkyl groups include HO—CH₂—, HO—CH₂CH₂—, and CH₂—CH(OH)—.

[0280] “Haloalkyl” means an alkyl group substituted with one or more halogens. Examples of haloalkyl groups include, but are not limited to, trifluoromethyl, difluoromethyl, pentafluoroethyl, trichloromethyl, etc.

[0281] “Haloalkoxy” means an alkoxy group substituted with one or more halogens. Examples of haloalkyl groups include, but are not limited to, trifluoromethoxy, difluoromethoxy, pentafluoroethoxy, trichloromethoxy, etc.

[0282] “Cyano” means a substituent having a carbon atom joined to a nitrogen atom by a triple bond, e.g., C≡N.

[0283] “Amino” means a substituent containing at least one nitrogen atom (e.g., NH₂).

[0284] “Alkylamino” means an amino or NH₂ group where one of the hydrogens is replaced with an alkyl group, e.g., —NH(alkyl). Examples of alkylamino groups include, but are not limited to, methylamino (e.g., —NH(CH₃)), ethylamino, propylamino, iso-propylamino, n-butylamino, sec-butylamino, tert-butylamino, etc.

[0285] “Dialkylamino” means an amino or NH₂ group where both of the hydrogens are replaced with alkyl groups, e.g., —N(alkyl)₂. The alkyl groups on the amino group are the same or different alkyl groups. Examples of dialkylamino groups include, but are not limited to, dimethylamino (e.g., —N(CH₃)₂), diethylamino, dipropylamino, diiso-propylamino, di-n-butylamino, di-sec-butylamino, di-tert-butylamino, methyl(ethyl)amino, methyl(butylamino), etc.

[0286] “Spirocycloalkyl” or “spirocyclyl” means carbogenic bicyclic ring systems with both rings connected through a single atom. The rings can be different in size and nature, or identical in size and nature. Examples include spiropentane, spirohexane, spiroheptane, spirooctane, spirononane, or spirodecane. One or both of the rings in a spirocycle can be fused to another ring carbocyclic, heterocyclic, aromatic, or heteroaromatic ring. A (C₃-C₁₂)spirocycloalkyl is a spirocycle containing between 3 and 12 carbon atoms.

[0287] “Spiroheterocycloalkyl” or “spiroheterocyclyl” means a spirocycle wherein at least one of the rings is a heterocycle one or more of the carbon atoms can be substituted with a heteroatom (e.g., one or more of the carbon atoms can be substituted with a heteroatom in at least one of the rings). One or both of the rings in a spiroheterocycle can be fused to another ring carbocyclic, heterocyclic, aromatic, or heteroaromatic ring.

[0288] The term “ZBTB32” refers to zinc finger and BTB domain containing 32, also known as Rog, FAXF, FAZF, TZFP, ZNF538, or zinc finger and BTB domain-containing protein 32. GenBank Accession Numbers: NM_001316902.2, NM_001316903.2, and NM_014383.3 provide exemplary ZBTB32 nucleotide sequences. GenBank Accession Numbers: NP_055198.1, NP_001303831.1, and NP_001303832.1 provide exemplary ZBTB32 amino acid sequences.

[0289] The term “IL-15 receptor molecule” as used herein refers to a full-length naturally-occurring IL-15 receptor alpha (IL-15Ra) (e.g., a mammalian IL-15Ra, e.g., human IL-15Ra, e.g., GenBank Accession Number AAI21141.1), a functional fragment of IL-15Ra, or an active variant having at least 80%, 85%, 90%, 95%, 96%, 97%, 98%, or 99% sequence identity to a naturally-occurring wild type polypeptide of IL-15Ra or fragment thereof. In some embodiments, the variant is a derivative, e.g., a mutant, of a wild type polypeptide or nucleic acid encoding the same. In some embodiments, the IL-15Ra variant, e.g., active variant of IL-15Ra, has at least 50%, 60%, 70%, 80%, 85%, 90%, 95%, 96%, 97%, 98%, 99% or 100% activity of the wild type IL-15Ra polypeptide. In some embodiments, the IL-15Ra molecule comprises one or more post-translational modifications. As used herein, the terms IL-15R and IL-15Ra are interchangeable.

[0290] The term “IL-15 molecule” as used herein refers to a full-length naturally-occurring IL-15 (e.g., a mammalian IL-15, e.g., human IL-15, e.g., GenBank Accession Number AAI00963.1), a functional fragment of IL-15, or an active variant having at least 80%, 85%, 90%, 95%, 96%, 97%, 98%, or 99% sequence identity to a naturally-occurring wild type polypeptide of IL-15 or fragment thereof. In some embodiments, the variant is a derivative, e.g., a mutant, of a wild type polypeptide or nucleic acid encoding the same. In some embodiments, the IL-15 variant, e.g., active variant of IL-15, has at least 50%, 60%, 70%, 80%, 85%, 90%, 95%, 96%, 97%, 98%, 99% or 100% activity of the wild type IL-15 polypeptide. In some embodiments, the IL-15 molecule comprises one or more post-translational modifications.

[0291] As used herein, an “active variant” of a cytokine molecule refers to a cytokine variant having at least 50%, 60%, 70%, 80%, 85%, 90%, 95%, 96%, 97%, 98%, 99% or 100% activity of wild type cytokine, e.g., as measured by an art-recognized assay.

[0292] Various embodiments of the compositions and methods herein are described in further detail below. Additional definitions are set out throughout the specification.

### ZBTB32

[0293] Zinc finger and BTB domain-containing protein 32 is a protein that in humans is encoded by the ZBTB32 gene. The ZBTB32 protein is also known as fanconi anemia zinc finger protein (FAZF), testis zinc finger protein (TZFP), FANCC-Interacting Protein (FAXP), zinc finger protein 538 (ZNF538), repressor of GATA3 (ROG), and promyelocytic leukemia zinc finger and zbtb16 (PLZF)-like zinc finger protein (PLZP). It contains a N-terminal BTB/POZ domain (IPR000210) or a SKP1/BTB/POZ domain (IPR011333), and three C-terminal zinc fingers, Znf_C2H2_sf. (IPR036236), Znf_C2H2 type domain (IPR013087), a Znf_RING/FYVE/PHD domain (IPR013083), followed by a putative UBZ4 domain (Rizzo et al. (2014) Biochemistry. 53 (37): 5895-906). It is a member of the Poxviruses and Zinc-finger (POZ) and Kruppel (POK) family of proteins and was identified in multiple screens involving either immune cell tumorigenesis or immune cell development (Hoatlin et al. (1999) Blood. 94 (11): 3737-47).

[0294] The ZBTB32 protein can function as a transcriptional repressor. For example, the ZBTB32 protein can recruit histone modification enzymes to chromatin to affect gene activation (Yoon et al. Journal of Immunology. 189 (5): 2393-403). ZBTB32 can also recruit corepressors, such as nuclear receptor corepressor (NCoR) and histone deacetylases (HDACs) to its target genes, induces repressive chromatin states and acts cooperatively with other proteins, such as Blimp-1, to suppress the transcription of genes.

[0295] The ZBTB32 protein can interact with a number of proteins, include, for example, Fanconi anemia complementation group C (Fancc), thioredoxin interacting protein (Txnip), vitamin D3 upregulated protein 1 (VDUP1), zinc finger and BTB domain-containing protein 16 (Zbtb16), zinc-finger elbow-related proline domain protein 2 (Zpo2), and GATA binding protein 2 (GATA2) and GATA3 (Hoatlin et al. (1999) Blood. 94 (11): 3737-47; Tsuzuki et al. (2002) Blood. 99: 3404-3410; Miaw et al (2000) Immunity. 12: 323-333).

[0296] The ZBTB32 gene is expressed in T and B cells upon activation, but also highly expressed in testis. The expression of ZBTB32 is induced by inflammatory cytokines in natural killer cells (Beaulieu et al. (2014). Nat Immunol. 15: 546-555). ZBTB32 is highly expressed in diffuse large B-cell lymphoma (DLBCL) and appears to bind to and represses the expression of MHC class II transactivator (CIITA) and, as a consequence, MHCII genes (Yoon et al. J Immunol (2012). 189: 2393-2403). Zpo2 drives aggressive breast cancer by Zbtb32-mediated GATA3 suppression (Shahi et al. (2017). Proc Natl Acad Sci USA. 114 (12): 3169-3174). ZBTB32 is also identified in colon cancer based on a survival analysis of candidate biomarkers in a DNA methylation correlation network (Zhang et al. (2015). PLoS One. 10 (3): e0120361). The expression of Zbtb32 is upregulated after exposure to cisplatin (Sourisseau et al. (2016). Cell Cycle. 15 (2): 295-302).

[0297] In some embodiments of any of the compositions, methods or uses, disclosed herein, a ZBTB32 protein comprises an amino acid sequence having at least 80%, 85%, 90%, 95%, 96%, 97%, 98%, or 99% sequence identity to the amino acid sequence of SEQ ID NO: 2265, 2267, or 2269. In some embodiments, the ZBTB32 protein comprises the amino acid sequence of SEQ ID NO: 2265, 2267, or 2269.

[0298] In some embodiments of any of the compositions, methods, or uses, disclosed herein, the ZBTB32 protein is encoded by a nucleotide sequence having at least 80%, 85%, 90%, 95%, 96%, 97%, 98%, or 99% sequence identity to the nucleotide sequence of SEQ ID NO: 2266, 2268, or 2270. In some embodiments, the ZBTB32 protein is encoded by the nucleotide sequence of SEQ ID NO: 2266, 2268, or 2270.

[0299] In some embodiments, an immune effector cell described herein, e.g., a CAR-expressing immune effector cell, comprises a nucleic acid sequence, e.g., a transgene, comprising the sequence of SEQ ID NO: 2266, 2268, or 2270.

### Exemplary ZBTB32 Amino Acid and Nucleotide Sequences

```
Isoform 1 (Transcript Variant 1)
Amino acid: NP_055198.1
(SEQ ID NO: 2265)
      1 mslppirlps pygsdrlvql aarlrpalcd tlitvgsqef pahslvlagv sqqlgrrgqw
    61 algegispst faqllnfvyg esvelqpgel rplqeaaral gvqsleeacw rargdrakkp
  121 dpglkkhqee pekpsrnper elgdpgekqk peqvsrtggr eqemlhkhsp prgrpemaga
  181 tqeaqqeqtr skekrlqapv gqrgadgkhg vltwlrenpg gseeslrklp gplppagslq
  241 tsvtprpswa eapwlvggqp alwsillmpp rygipfyhst pttgawqevw reqriplsln
  301 apkglwsqnq lasssptpgs lpqgpaqlsp gemeesdqgh tgalatcagh edkagcpprp
  361 hpppappars rpyacsvcgk rfslkhqmet hyrvhtgekp fscslcpqrs rdfsamtkhl
  421 rthgaapyrc slcgagcpsl asmqahmrgh spsqlppgwt irstflysss rpsrpstspc
  481 cpssstt
Coding sequence: NM_014383.3
(SEQ ID NO: 2266)
      1 actcggcctt aagccgtcct gggtgtatgt gaggctgaaa gggaaggagg aacagggtct
    61 gggccgctgt gtgctctgcc gtcatctcta agaaacaacc ataccactga atgctactgt
  121 gtacttacaa accacactca tattcgtcac gtcatttcat cttcaccccc acctccaaat
  181 gaggettgaa atgagatgag atgttcctcc ctcccctttc aaccatggac ctcacactgt
  241 ggacttcctc ttagagcctc tgagttaggt acccaagcca aggcacaatg tccctgcccc
  301 ccataagact gcccagcccc tatggctctg atcggctggt acagctagca gccaggctcc
  361 ggccagcact ctgtgatact ctgatcaccg tagggagcca ggagttcccc gcccacagcc
  421 tggtgctagc aggtgtcagc cagcagctgg gccgcagggg ccagtgggct ctgggagaag
  481 gcatcagccc ttctaccttt gcccagctcc tgaactttgt gtatggggag agtgtagagc
  541 tgcagcctgg agagctaagg ccccttcagg aggcggccag ggccttggga gtgcagtccc
  601 tggaagaggc atgctggagg gctcgagggg acagggctaa aaagccagat ccaggcctga
  661 agaaacatca ggaggagcca gagaaaccct caaggaatcc tgagagagaa ctgggggacc
  721 ctggagagaa gcagaaacca gaacaggttt ctagaactgg tgggagagaa caggagatgt
  781 tgcacaagca ctcgccacca agaggcagac ccgagatggc aggagcaacg caggaggctc
  841 agcaggaaca gaccaggtca aaggagaaac gcctccaagc ccctgttggc caaaggggag
  901 cagatgggaa gcatggagtg ctcacgtggt tgagggaaaa tccagggggc tctgaggaaa
  961 gtctgcgcaa gctccctggc ccccttcccc cagcaggctc cctgcaaacc agcgtcaccc
1021 ctaggccctc gtgggctgag gccccttggt tggtgggggg ccagcctgcc ctgtggagca
1081 tcctgctgat gccgcccaga tatggcattc ccttctacca tagcaccccc accactggag
1141 cctggcagga ggtctggcgg gaacagagga tcccactgtc cctaaatgcc cccaaagggc
1201 tctggagcca gaaccagttg gcctcctcca gccctacccc aggttccctc ccccagggcc
1261 ccgcacagct cagccctggg gagatggaag agtctgatca ggggcacaca ggcgcacttg
1321 caacctgtgc gggtcatgag gacaaggcag getgcccacc tcgcccgcac cctcccccgg
1381 cccctcctgc tcggtctcgg ccctatgcgt gctctgtctg tggaaagagg ttttcactca
1441 agcatcagat ggagacgcac taccgagtcc acacaggaga gaagcccttc tectgtagcc
1501 tttgtcctca gcgctcccgg gacttctcgg ccatgaccaa gcacctgcgg acacacgggg
1561 ccgctccgta ccgctgctcc ctgtgcgggg ccggctgtcc cagcctggcc tccatgcagg
1621 cgcacatgcg cggtcactcg cccagccaac tcccgcccgg atggaccatc cgctccacct
1681 tcctctactc ctcctcgagg ccgtctcggc cctcgacctc tccctgttgt ccttcttcct
1741 ccaccacctg acggggtgtc ggtagcgtct tagccaagag tccaattaaa gaacgaaaag
1801 cgggccggct cggcttctga cctggcaccg ctgctacggc ggcctagcaa attccgcccc
1861 agaagcgccc caggaagggc gccgagtgcc ctctcctgga cgatcgcggg tcgcagaagc
1921 ccaggccagc gagccctaca gagtgaggac actgaagtgt gcaggagcga aggttaacag
1981 taggggagat tgtcgatctc atcaccataa taaagagttt cctgtgccct cccttca
Isoform 2 (Transcript Variant 2)
Amino acid: NP_001303831.1
(SEQ ID NO: 2267)
      1 mstpttgawq evwreqripl slnapkglws qnqlassspt pgstpqgpaq lspgemeesd
    61 qghtgalatc aghedkagcp prphpppapp arsrpyacsv cgkrfslkhq methyrvhtg
  121 ekpfscslcp qrsrdfsamt khlrthgaap yrcslcgagc pslasmqahm rghspsqlpp
  181 gwtirstfly sssrpsrpst spccpssstt
Coding sequence: NM_001316902.2
(SEQ ID NO: 2268)
      1 actcggcctt aagccgtcct gggtgtatgt gaggctgaaa gggaaggagg aacagggtct
    61 gggccgctgt gtgctctgcc gtcatctcta agaaacaacc ataccactga atgctactgt
  121 gtacttacaa accacactca tattcgtcac gtcatttcat cttcaccccc acctccaaat
  181 gagcaccccc accactggag cctggcagga ggtctggcgg gaacagagga tcccactgtc
  241 cctaaatgcc cccaaagggc tctggagcca gaaccagttg gcctcctcca gccctacccc
  301 aggttccctc ccccagggcc ccgcacagct cagccctggg gagatggaag agtctgatca
  361 ggggcacaca ggcgcacttg caacctgtgc gggtcatgag gacaaggcag gctgcccacc
  421 tcgcccgcac cctcccccgg cccctcctgc tcggtctcgg ccctatgcgt gctctgtctg
  481 tggaaagagg ttttcactca agcatcagat ggagacgcac taccgagtcc acacaggaga
  541 gaagcccttc tcctgtagcc tttgtcctca gcgctcccgg gacttctcgg ccatgaccaa
  601 gcacctgcgg acacacgggg ccgctccgta ccgctgctcc ctgtgcgggg ccggctgtcc
  661 cagcctggcc tccatgcagg cgcacatgcg cggtcactcg cccagccaac tcccgcccgg
  721 atggaccatc cgctccacct tcctctactc ctcctcgagg ccgtctcggc cctcgacctc
  781 tccctgttgt ccttcttcct ccaccacctg acggggtgtc ggtagcgtct tagccaagag
  841 tccaattaaa gaacgaaaag cgggccggct cggcttctga cctggcaccg ctgctacggc
  901 ggcctagcaa attccgcccc agaagcgccc caggaagggc gccgagtgcc ctctcctgga
  961 cgatcgcggg tcgcagaagc ccaggccagc gagccctaca gagtgaggac actgaagtgt
1021 gcaggagcga aggttaacag taggggagat tgtcgatctc atcaccataa taaagagttt
1081 cctgtgccct cccttca
Isoform 3 (Transcript Variant 3)
Amino acid: NP_001303832.1
(SEQ ID NO: 2269)
      1 meesdqghtg alatcaghed kagcpprphp ppapparsrp yacsvcgkrf slkhqmethy
    61 rvhtgekpfs cslcpqrsrd fsamtkhlrt hgaapyrcsl cgagcpslas mqahmrghsp
  121 sqlppgwtir stflysssrp srpstspccp ssstt
Coding sequence: NM_001316903.2
(SEQ ID NO: 2270)
      1 actcggcctt aagccgtcct gggtgtatgt gaggctgaaa gggaaggagg aacagggtct
    61 gggccgctgt gtgctctgcc gtcatctcta agaaacaacc ataccactga atgctactgt
  121 gtacttacaa accacactca tattcgtcac gtcatttcat cttcaccccc acctccaaat
  181 gagcaccccc accactggag cctggcagga ggtctggcgg gaacagaggt tccctccccc
  241 agggccccgc acagctcagc cctggggaga tggaagagtc tgatcagggg cacacaggcg
  301 cacttgcaac ctgtgcgggt catgaggaca aggcaggctg cccacctcgc ccgcaccctc
  361 ccccggcccc tcctgctcgg tctcggccct atgcgtgctc tgtctgtgga aagaggtttt
  421 cactcaagca tcagatggag acgcactacc gagtccacac aggagagaag cccttctcct
  481 gtagcctttg tcctcagcgc tcccgggact tctcggccat gaccaagcac ctgcggacac
  541 acggggccgc tccgtaccgc tgctccctgt gcggggccgg ctgtcccagc ctggcctcca
  601 tgcaggcgca catgcgcggt cactcgccca gccaactccc gcccggatgg accatccgct
  661 ccaccttcct ctactcctcc tcgaggccgt ctcggccctc gacctctccc tgttgtcctt
  721 cttcctccac cacctgacgg ggtgtcggta gcgtcttagc caagagtcca attaaagaac
  781 gaaaagcggg ccggctcggc ttctgacctg gcaccgctgc tacggcggcc tagcaaattc
  841 cgccccagaa gcgccccagg aagggcgccg agtgccctct cctggacgat cgcgggtcgc
  901 agaagcccag gccagcgagc cctacagagt gaggacactg aagtgtgcag gagcgaaggt
  961 taacagtagg ggagattgtc gatctcatca ccataataaa gagtttcctg tgccctccct
1021 tca
```

### Gene Editing Systems

[0301] According to the present disclosure, gene editing systems can be used as ZBTB32 inhibitors. Also contemplated by the present disclosure are the uses of nucleic acid encoding one or more components of a gene editing system targeting the ZBTB32 gene.

### CRISPR/Cas9 Gene Editing Systems

[0302] Naturally-occurring CRISPR/Cas systems are found in approximately 40% of sequenced eubacteria genomes and 90% of sequenced archaea. Grissa et al. (2007) BMC Bioinformatics 8: 172. This system is a type of prokaryotic immune system that confers resistance to foreign genetic elements such as plasmids and phages and provides a form of acquired immunity. Barrangou et al. (2007) Science 315: 1709-1712; Marragini et al. (2008) Science 322: 1843-1845.

[0303] The CRISPR/Cas system has been modified for use in gene editing (silencing, enhancing or changing specific genes) in eukaryotes such as mice or primates. Wiedenheft et al. (2012) Nature 482: 331-8. This is accomplished by, for example, introducing into the eukaryotic cell a plasmid containing a specifically designed CRISPR and one or more appropriate Cas.

[0304] The CRISPR sequence, sometimes called a CRISPR locus, comprises alternating repeats and spacers. In a naturally-occurring CRISPR, the spacers usually comprise sequences foreign to the bacterium such as a plasmid or phage sequence; in an exemplary CRISPR/Cas system targeting the ZBTB32 gene, the spacers are derived from the ZBTB32 gene sequence, or a sequence of its regulatory elements.

[0305] RNA from the CRISPR locus is constitutively expressed and processed into small RNAs. These comprise a spacer flanked by a repeat sequence. The RNAs guide other Cas proteins to silence exogenous genetic elements at the RNA or DNA level. Horvath et al. (2010) Science 327: 167-170; Makarova et al. (2006) Biology Direct 1: 7. The spacers thus serve as templates for RNA molecules, analogously to siRNAs. Pennisi (2013) Science 341: 833-836.

[0306] As these naturally occur in many different types of bacteria, the exact arrangements of the CRISPR and structure, function and number of Cas genes and their product differ somewhat from species to species. Haft et al. (2005) PLoS Comput. Biol. 1: e60; Kunin et al. (2007) Genome Biol. 8: R61; Mojica et al. (2005) J. Mol. Evol. 60: 174-182; Bolotin et al. (2005) Microbiol. 151: 2551-2561; Pourcel et al. (2005) Microbiol. 151: 653-663; and Stem et al. (2010) Trends. Genet. 28: 335-340. For example, the Cse (Cas subtype, E. coli) proteins (e.g., CasA) form a functional complex, Cascade, that processes CRISPR RNA transcripts into spacer-repeat units that Cascade retains. Brouns et al. (2008) Science 321: 960-964. In other prokaryotes, Cas6 processes the CRISPR transcript. The CRISPR-based phage inactivation in E. coli requires Cascade and Cas3, but not Cas1 or Cas2. The Cmr (Cas RAMP module) proteins in Pyrococcus furiosus and other prokaryotes form a functional complex with small CRISPR RNAs that recognizes and cleaves complementary target RNAs. A simpler CRISPR system relies on the protein Cas9, which is a nuclease with two active cutting sites, one for each strand of the double helix. Combining Cas9 and modified CRISPR locus RNA can be used in a system for gene editing. Pennisi (2013) Science 341: 833-836.

[0307] The CRISPR/Cas system can thus be used to modify, e.g., delete one or more nucleic acids, the ZBTB32 gene, or a gene regulatory element of the ZBTB32 gene, or introduce a premature stop which thus decreases expression of a functional of the ZBTB32 gene. The CRISPR/Cas system can alternatively be used like RNA interference, turning off the ZBTB32 gene in a reversible fashion. In a mammalian cell, for example, the RNA can guide the Cas protein to a promoter of the ZBTB32 gene, sterically blocking RNA polymerases.

[0308] CRISPR/Cas systems for gene editing in eukaryotic cells typically involve (1) a guide RNA molecule (gRNA) comprising a targeting sequence (which is capable of hybridizing to the genomic DNA target sequence), and sequence which is capable of binding to a Cas, e.g., Cas9 enzyme, and (2) a Cas, e.g., Cas9, protein. The targeting sequence and the sequence which is capable of binding to a Cas, e.g., Cas9 enzyme, may be disposed on the same or different molecules. If disposed on different molecules, each includes a hybridization domain which allows the molecules to associate, e.g., through hybridization.

[0309] An exemplary gRNA molecule of the present disclosure comprises, e.g., consists of a first nucleic acid having the sequence (where the “n” 's refer to the residues of the targeting sequence (e.g., as described herein, e.g., in Table 3), and may consist of 15-25 nucleotides, e.g., consist of 20 nucleotides):

(SEQ ID NO: 3022)
nnnnnnnnnnnnnnnnnnnnGUUUUAGAGCUAUGCUGUUUUG;

[0310] and a second nucleic acid sequence having the sequence:

[0311] AACUUACCAAGGAACAGCAUAGCAAGUUAAAAUAAGGCUAGUCCGUUAUCAAC UUGAAAAAGUGGCACCGAGUCGGUGC, optionally with 1, 2, 3, 4, 5, 6, or 7 (e.g., 4 or 7, e.g., 7) additional U nucleotides at the 3′ end (SEQ ID NO: 3024).

[0312] The second nucleic acid molecule may alternatively consist of a fragment of the sequence above, wherein such fragment is capable of hybridizing to the first nucleic acid. An example of such second nucleic acid molecule is:

[0313] AACAGCAUAGCAAGUUAAAAUAAGGCUAGUCCGUUAUCAACUUGAAAAAGUG GCACCGAGUCGGUGC, optionally with 1, 2, 3, 4, 5, 6, or 7 (e.g., 4 or 7, e.g., 7) additional U nucleotides at the 3′ end (SEQ ID NO: 3026).

[0314] Another exemplary gRNA molecule of the present disclosure comprises, e.g., consists of a first nucleic acid having the sequence (where the “n” 's refer to the residues of the targeting sequence (e.g., as described herein, e.g., in Table 3), and may consist of 15-25 nucleotides, e.g., consist of 20 nucleotides):

[0315] nnnnnnnnnnnnnnnnnnnGUUUUAGAGCUAGAAAUAGCAAGUUAAAAUAAGGCUAGU CCGUUAUCAACUUGAAAAAGUGGCACCGAGUCGGUGC (SEQ ID NO: 3028), optionally with 1, 2, 3, 4, 5, 6, or 7 (e.g., 4 or 7, e.g., 4) additional U nucleotides at the 3′ end. Artificial CRISPR/Cas systems can be generated which inhibit the ZBTB32 gene, using technology known in the art, e.g., that are described in U.S. Publication No. 20140068797, WO2015/048577, and Cong (2013) Science 339: 819-823. Other artificial CRISPR/Cas systems that are known in the art may also be generated which inhibit the ZBTB32 gene, e.g., that described in Tsai (2014) Nature Biotechnol., 32:6 569-576, U.S. Pat. Nos. 8,871,445; 8,865,406; 8,795,965; 8,771,945; and 8,697,359, the contents of which are hereby incorporated by reference in their entirety. Such systems can be generated which inhibit the ZBTB32 gene, by, for example, engineering a CRISPR/Cas system to include a gRNA molecule comprising a targeting sequence that hybridizes to a sequence of a target gene, e.g., the ZBTB32 gene. In embodiments, the gRNA comprises a targeting sequence which is fully complementarity to 15-25 nucleotides, e.g., 20 nucleotides, of a target gene, e.g., the ZBTB32 gene. In embodiments, the 15-25 nucleotides, e.g., 20 nucleotides, of a target gene, e.g., the ZBTB32 gene, are disposed immediately 5′ to a protospacer adjacent motif (PAM) sequence recognized by the Cas protein of the CRISPR/Cas system (e.g., where the system comprises a S. pyogenes Cas9 protein, the PAM sequence comprises NGG, where N can be any of A, T, G or C).

[0316] In one embodiment, foreign DNA can be introduced into the cell along with the CRISPR/Cas system, e.g., DNA encoding a CAR, e.g., as described herein; depending on the sequences of the foreign DNA and chromosomal sequence, this process can be used to integrate the DNA encoding the CAR, e.g., as described herein, at or near the site targeted by the CRISPR/Cas system. As shown herein, in the examples, but without being bound by theory, such integration may lead to the expression of the CAR as well as disruption of the ZBTB32 gene. Such foreign DNA molecule is referred to herein as “template DNA.” In embodiments, the template DNA further comprises homology arms 5′ to, 3′ to, or both 5′ and 3′ to the nucleic acid of the template DNA which encodes the molecule or molecules of interest (e.g., which encodes a CAR described herein), wherein said homology arms are complementary to genomic DNA sequence flanking the target sequence.

[0317] In an embodiment, the CRISPR/Cas system of the present disclosure comprises Cas9, e.g., S. pyogenes Cas9, and a gRNA comprising a targeting sequence which hybridizes to a sequence of the ZBTB32 gene. In an embodiment, the CRISPR/Cas system comprises nucleic acid encoding a gRNA specific for the ZBTB32 gene, and a nucleic acid encoding a Cas protein, e.g., Cas9, e.g., S. pyogenes Cas9. In an embodiment, the CRISPR/Cas system comprises a gRNA specific for the ZBTB32 gene, and a nucleic acid encoding a Cas protein, e.g., Cas9, e.g., S. pyogenes Cas9.

### TALEN Gene Editing Systems

[0318] TALENs are produced artificially by fusing a TAL effector DNA binding domain to a DNA cleavage domain. Transcription activator-like effects (TALEs) can be engineered to bind any desired DNA sequence, including a portion of the HLA or TCR gene. By combining an engineered TALE with a DNA cleavage domain, a restriction enzyme can be produced which is specific to any desired DNA sequence, including a HLA or TCR sequence. These can then be introduced into a cell, wherein they can be used for genome editing. Boch (2011) Nature Biotech. 29: 135-6; and Boch et al. (2009) Science 326: 1509-12; Moscou et al. (2009) Science 326: 3501.

[0319] TALEs are proteins secreted by Xanthomonas bacteria. The DNA binding domain contains a repeated, highly conserved 33-34 amino acid sequence, with the exception of the 12th and 13th amino acids. These two positions are highly variable, showing a strong correlation with specific nucleotide recognition. They can thus be engineered to bind to a desired DNA sequence.

[0320] To produce a TALEN, a TALE protein is fused to a nuclease (N), which is, for example, a wild-type or mutated FokI endonuclease. Several mutations to FokI have been made for its use in TALENs; these, for example, improve cleavage specificity or activity. Cermak et al. (2011) Nucl. Acids Res. 39: e82; Miller et al. (2011) Nature Biotech. 29: 143-8; Hockemeyer et al. (2011) Nature Biotech. 29: 731-734; Wood et al. (2011) Science 333: 307; Doyon et al. (2010) Nature Methods 8: 74-79; Szczepek et al. (2007) Nature Biotech. 25: 786-793; and Guo et al. (2010) J. Mol. Biol. 200: 96.

[0321] The FokI domain functions as a dimer, requiring two constructs with unique DNA binding domains for sites in the target genome with proper orientation and spacing. Both the number of amino acid residues between the TALE DNA binding domain and the FokI cleavage domain and the number of bases between the two individual TALEN binding sites appear to be important parameters for achieving high levels of activity. Miller et al. (2011) Nature Biotech. 29: 143-8.

[0322] A TALEN specific for the ZBTB32 gene, can be used inside a cell to produce a double-stranded break (DSB). A mutation can be introduced at the break site if the repair mechanisms improperly repair the break via non-homologous end joining. For example, improper repair may introduce a frame shift mutation. Alternatively, foreign DNA can be introduced into the cell along with the TALEN, e.g., DNA encoding a CAR, e.g., as described herein; depending on the sequences of the foreign DNA and chromosomal sequence, this process can be used to integrate the DNA encoding the CAR, e.g., as described herein, at or near the site targeted by the TALEN. As shown herein, in the examples, but without being bound by theory, such integration may lead to the expression of the CAR as well as disruption of the ZBTB32 gene. Such foreign DNA molecule is referred to herein as “template DNA.” In embodiments, the template DNA further comprises homology arms 5′ to, 3′ to, or both 5′ and 3′ to the nucleic acid of the template DNA which encodes the molecule or molecules of interest (e.g., which encodes a CAR described herein), wherein said homology arms are complementary to genomic DNA sequence flanking the target sequence.

[0323] TALENs specific to sequences in the ZBTB32 gene, can be constructed using any method known in the art, including various schemes using modular components. Zhang et al. (2011) Nature Biotech. 29: 149-53; Geibler et al. (2011) PLoS ONE 6: e19509; U.S. Pat. Nos. 8,420,782; 8,470,973, the contents of which are hereby incorporated by reference in their entirety.

### Zinc Finger Nucleases

[0324] “ZFN” or “Zinc Finger Nuclease” refer to a zinc finger nuclease, an artificial nuclease which can be used to modify, e.g., delete one or more nucleic acids of, a desired nucleic acid sequence, e.g., the ZBTB32 gene.

[0325] Like a TALEN, a ZFN comprises a FokI nuclease domain (or derivative thereof) fused to a DNA-binding domain. In the case of a ZFN, the DNA-binding domain comprises one or more zinc fingers. Carroll et al. (2011) Genetics Society of America 188: 773-782; and Kim et al. (1996) Proc. Natl. Acad. Sci. USA 93: 1156-1160.

[0326] A zinc finger is a small protein structural motif stabilized by one or more zinc ions. A zinc finger can comprise, for example, Cys2His2, and can recognize an approximately 3-bp sequence. Various zinc fingers of known specificity can be combined to produce multi-finger polypeptides which recognize about 6, 9, 12, 15 or 18-bp sequences. Various selection and modular assembly techniques are available to generate zinc fingers (and combinations thereof) recognizing specific sequences, including phage display, yeast one-hybrid systems, bacterial one-hybrid and two-hybrid systems, and mammalian cells.

[0327] Like a TALEN, a ZFN must dimerize to cleave DNA. Thus, a pair of ZFNs are required to target non-palindromic DNA sites. The two individual ZFNs must bind opposite strands of the DNA with their nucleases properly spaced apart. Bitinaite et al. (1998) Proc. Natl. Acad. Sci. USA 95: 10570-5.

[0328] Also like a TALEN, a ZFN can create a double-stranded break in the DNA, which can create a frame-shift mutation if improperly repaired, leading to a decrease in the expression of the ZBTB32 gene, in a cell. ZFNs can also be used with homologous recombination to mutate the ZBTB32 gene, or to introduce nucleic acid encoding a CAR at a site at or near the targeted sequence. As discussed above, the nucleic acid encoding a CAR may be introduced as part of a template DNA. In embodiments, the template DNA further comprises homology arms 5′ to, 3′ to, or both 5′ and 3′ to the nucleic acid of the template DNA which encodes the molecule or molecules of interest (e.g., which encodes a CAR described herein), wherein said homology arms are complementary to genomic DNA sequence flanking the target sequence.

[0329] ZFNs specific to sequences in the ZBTB32 gene, can be constructed using any method known in the art. See, e.g., Provasi (2011) Nature Med. 18: 807-815; Torikai (2013) Blood 122: 1341-1349; Cathomen et al. (2008) Mol. Ther. 16: 1200-7; and Guo et al. (2010) J. Mol. Biol. 400: 96; U.S. Patent Publication 2011/0158957; and U.S. Patent Publication 2012/0060230, the contents of which are hereby incorporated by reference in their entirety. In embodiments, The ZFN gene editing system may also comprise nucleic acid encoding one or more components of the ZFN gene editing system, e.g., a ZFN gene editing system targeted to the ZBTB32 gene.

[0330] Without being bound by theory, it is believed that use of gene editing systems (e.g., CRISPR/Cas gene editing systems) which target the ZBTB32 gene, may allow one to modulate (e.g., inhibit) one or more functions of the ZBTB32 gene, by, for example, causing an editing event which results in expression of a truncated ZBTB32 gene. Again, without being bound by theory, such a truncated ZBTB32 gene product may preserve one or more functions of the ZBTB32 gene product (e.g., a scaffolding function), while inhibiting one or more other functions ofthe ZBTB32 gene product (e.g., a catalytic function), and as such, may be preferable. Gene editing systems which target a late exon or intron of the ZBTB32 gene, may be particularly preferred in this regard. In an aspect, the gene editing system of the disclosure targets a late exon or intron of the ZBTB32 gene. In an aspect, the gene editing system of the disclosure targets an exon or intron downstream of exon 8. In an aspect, the gene editing system targets exon 8 or exon 9, e.g., exon 9, of the ZBTB32 gene.

[0331] Without being bound by theory, it may also be preferable in other embodiments to target an early exon or intron of the ZBTB32 gene, for example, to introduce a premature stop codon in the targeted gene which results in no expression of the gene product, or expression of a completely non-functional gene product. Gene editing systems which target an early exon or intron of the ZBTB32 gene, may be particularly preferred in this regard. In an aspect, the gene editing system of the disclosure targets an early exon or intron of the ZBTB32 gene. In an aspect, the gene editing system of the disclosure targets an exon or intron upstream of exon 4. In embodiments, the gene editing system targets exon 1, exon 2, or exon 3, e.g., exon 3, of the ZBTB32 gene.

[0332] Without being bound by theory, it may also be preferable in other embodiments to target a sequence of the ZBTB32 gene, which is specific to one or more isoforms of the gene but does not affect one or more other isoforms of the gene. In embodiments, it may be preferable to specifically target an isoform of the ZBTB32 gene which contain a catalytic domain.

### Double-Stranded RNA, e.g., SiRNA or ShRNA, Inhibitors

[0333] According to the present disclosure, double stranded RNA (“dsRNA”), e.g., siRNA or shRNA can be used as ZBTB32 inhibitors. Also contemplated by the present disclosure are the uses of nucleic acid encoding said dsRNA inhibitors.

[0334] In an embodiment, the modulator (e.g., inhibitor) of the ZBTB32 gene is a nucleic acid, e.g., a dsRNA, e.g., a siRNA or shRNA specific for a nucleic acid encoding a ZBTB32 gene product, e.g., genomic DNA or mRNA encoding a ZBTB32 gene product.

[0335] An aspect of the disclosure provides a composition comprising a dsRNA, e.g., a siRNA or shRNA, comprising at least 15 contiguous nucleotides, e.g., 15, 16, 17, 18, 19, 20, 21, 22, 23, 24 or 25 contiguous nucleotides, e.g., 21 contiguous nucleotides, which are complementary (e.g., 100% complementary) to a sequence of the ZBTB32 gene, nucleic acid sequence (e.g., genomic DNA or mRNA encoding a ZBTB32 gene product. It is understood that some of the target sequences and/or shRNA molecules are presented as DNA, but the dsRNA agents targeting these sequences or comprising these sequences can be RNA, or any nucleotide, modified nucleotide or substitute disclosed herein and/or known in the art, provided that the molecule can still mediate RNA interference.

[0336] In an embodiment, a nucleic acid molecule that encodes a dsRNA molecule that inhibits expression of the ZBTB32 gene, is operably linked to a promoter, e.g., a H1- or a U6-derived promoter such that the dsRNA molecule that inhibits expression of the ZBTB32 gene, is expressed within a CAR-expressing cell. See e.g., Tiscornia G., “Development of Lentiviral Vectors Expressing siRNA,” Chapter 3, in Gene Transfer: Delivery and Expression of DNA and RNA (eds. Friedmann and Rossi). Cold Spring Harbor Laboratory Press, Cold Spring Harbor, NY, USA, 2007; Brummelkamp T R, et al. (2002) Science 296: 550-553; Miyagishi M, et al. (2002) Nat. Biotechnol. 19: 497-500. In an embodiment the nucleic acid molecule that encodes a dsRNA molecule that inhibits expression of the ZBTB32 gene, is present on the same vector, e.g., a lentiviral vector, that comprises a nucleic acid molecule that encodes a component, e.g., all of the components, of the CAR. In such an embodiment, the nucleic acid molecule that encodes a dsRNA molecule that inhibits expression of the ZBTB32 gene, is located on the vector, e.g., the lentiviral vector, 5′- or 3′- to the nucleic acid that encodes a component, e.g., all of the components, of the CAR. The nucleic acid molecule that encodes a dsRNA molecule that inhibits expression of the ZBTB32 gene, can be transcribed in the same or different direction as the nucleic acid that encodes a component, e.g., all of the components, of the CAR. In an embodiment the nucleic acid molecule that encodes a dsRNA molecule that inhibits expression of the ZBTB32 gene, is present on a vector other than the vector that comprises a nucleic acid molecule that encodes a component, e.g., all of the components, of the CAR. In an embodiment, the nucleic acid molecule that encodes a dsRNA molecule that inhibits expression of the ZBTB32 gene, is transiently expressed within a CAR-expressing cell. In an embodiment, the nucleic acid molecule that encodes a dsRNA molecule that inhibits expression of the ZBTB32 gene, is stably integrated into the genome of a CAR-expressing cell.

[0337] Examples of nucleic acid sequences that encode shRNA sequences are provided below. The target sequence refers to the sequence within the ZBTB32 genomic DNA (or surrounding DNA). The nucleic acid encoding ZBTB32 shRNA encodes shRNA molecules useful in the present disclosure. In embodiments, the ZBTB32 inhibitor is an siRNA or shRNA specific for a target sequence listed below, or specific for its mRNA complement.

### Antibody Molecules, e.g., Single-Domain Antibodies

[0338] According to the present disclosure, antibody molecules can be used as ZBTB32 inhibitors. Also contemplated by the present disclosure are the uses of nucleic acid encoding the antibody molecules targeting a protein encoded by the ZBTB32 gene.

[0339] In some embodiments, the ZBTB32 inhibitor is a single-domain antibody (sdAb), also known as a nanobody. In other embodiments, the ZBTB32 inhibitor is a nucleic acid encoding the single domain antibody.

[0340] Single-domain antibodies can include antibodies whose complementary determining regions are part of a single-domain polypeptide. Examples include, but are not limited to, heavy chain antibodies, antibodies naturally devoid of light chains, single-domain antibodies derived from conventional 4-chain antibodies, engineered antibodies and single-domain scaffolds other than those derived from antibodies. Single-domain antibodies may be any of the art, or any future single-domain antibodies. Single-domain antibodies may be derived from any species including, but not limited to mouse, human, camel, llama, fish, shark, goat, rabbit, and bovine. According to another aspect of the disclosure, a single-domain antibody is a naturally occurring single-domain antibody known as heavy chain antibody devoid of light chains. Such single-domain antibodies are disclosed in WO 94/04678, for example. For clarity reasons, this variable domain derived from a heavy chain antibody naturally devoid of light chain is known herein as a VHH or nanobody to distinguish it from the conventional VH of four chain immunoglobulins. Such a VHH molecule can be derived from antibodies raised in Camelidae species, for example in camel, llama, dromedary, alpaca and guanaco. Other species besides Camelidae may produce heavy chain antibodies naturally devoid of light chain; such VHHs are within the scope of the disclosure.

### Chimeric Antigen Receptor (CAR)

[0341] In some embodiments, disclosed herein are methods of making and using an immune effector cell (e.g., a population of immune effector cells) that expresses a CAR molecule (e.g., as described herein), and has reduced expression and/or a reduced biological activity of ZBTB32. In some embodiments, an exemplary CAR construct comprises an optional leader sequence (e.g., a leader sequence described herein), an antigen binding domain (e.g., an antigen binding domain described herein), a hinge (e.g., a hinge region described herein), a transmembrane domain (e.g., a transmembrane domain described herein), and an intracellular stimulatory domain (e.g., an intracellular stimulatory domain described herein). In some embodiments, an exemplary CAR construct comprises an optional leader sequence (e.g., a leader sequence described herein), an extracellular antigen binding domain (e.g., an antigen binding domain described herein), a hinge (e.g., a hinge region described herein), a transmembrane domain (e.g., a transmembrane domain described herein), an intracellular costimulatory signaling domain (e.g., a costimulatory signaling domain described herein) and/or an intracellular primary signaling domain (e.g., a primary signaling domain described herein).

[0342] Sequences of non-limiting examples of various components that can be part of a CAR molecule described herein, are listed in Table 1 and Table 2, where “aa” stands for amino acids, and “na” stands for nucleic acids that encode the corresponding peptide.

TABLE 1
Exemplary sequences for various components of CAR

| | | |
|---|---|---|
| SEQ ID | pGK | AGCTTATGGTGCCCCAACCCCAACGCGGAAAAGGTTCCGTCGGGAC |
| NO: 13 | promoter | CCAAACGCGTCCCTGCGCCGACGAGACCCGCACCAAGGCCCTTTGC |
| | | GTCGCCGCGGCTGGGACCCAGAGCGTGTAAGAAGTGCAGGCAAGC |
| | | GTCGCAGTGGGCCTAGAAGCGGCGATGGGAACACCCGGGGGGCCG |
| | | CTGCGAAGGACGAGGCGGGGATTCAGCCCTTCCAAGGAACGCCAAG |
| | | CGCCGCACGGCCTGCACTATTTGCCTTCGGCGTGCAGAGTGATCATG |
| | | GGAGCGTCTGCCTGTCGCGGTCCCTCGTTACCGTCGCGCGGCTGGCG |
| | | CTACCCGACACCGGTTATCGCCGACGAGTCGTCCCGCGCGGCTCTCG |
| | | TCGCCGGCCCTTCCCCGCCACGCCCTCCGCCCCACACCCCGCCATCA |
| | | CACCCGGGACAAGGACGGGCGCGCCACAAGGCGTAAGACGTTCGG |
| | | AGGCCTCGCGTGCAGCCGTCAGCCGAGGGAGCAACTGGCTTAGTGG |
| | | CTGGAGAGAGGGGT |
| SEQ ID | CTL019 | GACATCCAGATGACACAGACTACATCCTCCCTGTCTGCCTCTCTGGG |
| NO: 14 | scFv | AGACAGAGTCACCATCAGTTGCAGGGCAAGTCAGGACATTAGTAAA |
| | nucleotide | TATTTAAATTGGTATCAGCAGAAACCAGATGGAACTGTTAAACTCCT |
| | sequence | GATCTACCATACATCAAGATTACACTCAGGAGTCCCATCAAGGTTC |
| | | AGTGGCAGTGGGTCTGGAACAGATTATTCTCTCACCATTAGCAACCT |
| | | GGAGCAAGAAGATATTGCCACTTACTTTTGCCAACAGGGTAATACG |
| | | CTTCCGTACACGTTCGGAGGGGGGACCAAGCTGGAGATCACAGGTG |
| | | GCGGTGGCTCGGGCGGTGGTGGGTCGGGTGGCGGCGGATCTGAGGT |
| | | GAAACTGCAGGAGTCAGGACCTGGCCTGGTGGCGCCCTCACAGAGC |
| | | CTGTCCGTCACATGCACTGTCTCAGGGGTCTCATTACCCGACTATGG |
| | | TGTAAGCTGGATTCGCCAGCCTCCACGAAAGGGTCTGGAGTGGCTG |
| | | GGAGTAATATGGGGTAGTGAAACCACATACTATAATTCAGCTCTCA |
| | | AATCCAGACTGACCATCATCAAGGACAACTCCAAGAGCCAAGTTTT |
| | | CTTAAAAATGAACAGTCTGCAAACTGATGACACAGCCATTTACTAC |
| | | TGTGCCAAACATTATTACTACGGTGGTAGCTATGCTATGGACTACTG |
| | | GGGCCAAGGAACCTCAGTCACCGTCTCCTCA |
| SEQ ID | CTL019 | DIQMTQTTSSLSASLGDRVTISCRASQDISKYLNWYQQKPDGTVKLLIY |
| NO: 15 | scFv amino | HTSRLHSGVPSRFSGSGSGTDYSLTISNLEQEDIATYFCQQGNTLPYTFG |
| | acid | GGTKLEITGGGGSGGGGSGGGGSEVKLQESGPGLVAPSQSLSVTCTVS |
| | sequence | GVSLPDYGVSWIRQPPRKGLEWLGVIWGSETTYYNSALKSRLTIIKDNS |
| | | KSQVFLKMNSLQTDDTAIYYCAKHYYYGGSYAMDYWGQGTSVTVSS |
| SEQ ID | P2A | GGAAGCGGAGCTACTAACTTCAGCCTGCTGAAGCAGGCTGGAGACG |
| NO: 23 | nucleotide | TGGAGGAGAACCCTGGACCT |
| | sequence | |
| SEQ ID | P2A amino | GSGATNFSLLKQAGDVEENPGP |
| NO: 24 | acid | |
| | sequence | |
| SEQ ID | CTL019 | GACATCCAGATGACACAGACTACATCCTCCCTGTCTGCCTCTCTGGG |
| NO: 25 | full-length | AGACAGAGTCACCATCAGTTGCAGGGCAAGTCAGGACATTAGTAAA |
| | nucleotide | TATTTAAATTGGTATCAGCAGAAACCAGATGGAACTGTTAAACTCCT |
| | sequence | GATCTACCATACATCAAGATTACACTCAGGAGTCCCATCAAGGTTC |
| | | AGTGGCAGTGGGTCTGGAACAGATTATTCTCTCACCATTAGCAACCT |
| | | GGAGCAAGAAGATATTGCCACTTACTTTTGCCAACAGGGTAATACG |
| | | CTTCCGTACACGTTCGGAGGGGGGACCAAGCTGGAGATCACAGGTG |
| | | GCGGTGGCTCGGGCGGTGGTGGGTCGGGTGGCGGCGGATCTGAGGT |
| | | GAAACTGCAGGAGTCAGGACCTGGCCTGGTGGCGCCCTCACAGAGC |
| | | CTGTCCGTCACATGCACTGTCTCAGGGGTCTCATTACCCGACTATGG |
| | | TGTAAGCTGGATTCGCCAGCCTCCACGAAAGGGTCTGGAGTGGCTG |
| | | GGAGTAATATGGGGTAGTGAAACCACATACTATAATTCAGCTCTCA |
| | | AATCCAGACTGACCATCATCAAGGACAACTCCAAGAGCCAAGTTTT |
| | | CTTAAAAATGAACAGTCTGCAAACTGATGACACAGCCATTTACTAC |
| | | TGTGCCAAACATTATTACTACGGTGGTAGCTATGCTATGGACTACTG |
| | | GGGCCAAGGAACCTCAGTCACCGTCTCCTCAACCACGACGCCAGCG |
| | | CCGCGACCACCAACACCGGCGCCCACCATCGCGTCGCAGCCCCTGT |
| | | CCCTGCGCCCAGAGGCGTGCCGGCCAGCGGCGGGGGGCGCAGTGCA |
| | | CACGAGGGGGCTGGACTTCGCCTGTGATATCTACATCTGGGCGCCCT |
| | | TGGCCGGGACTTGTGGGGTCCTTCTCCTGTCACTGGTTATCACCCTT |
| | | TACTGCAAACGGGGCAGAAAGAAACTCCTGTATATATTCAAACAAC |
| | | CATTTATGAGACCAGTACAAACTACTCAAGAGGAAGATGGCTGTAG |
| | | CTGCCGATTTCCAGAAGAAGAAGAAGGAGGATGTGAACTGAGAGT |
| | | GAAGTTCAGCAGGAGCGCAGACGCCCCCGCGTACAAGCAGGGCCA |
| | | GAACCAGCTCTATAACGAGCTCAATCTAGGACGAAGAGAGGAGTAC |
| | | GATGTTTTGGACAAGAGACGTGGCCGGGACCCTGAGATGGGGGGAA |
| | | AGCCGAGAAGGAAGAACCCTCAGGAAGGCCTGTACAATGAACTGC |
| | | AGAAAGATAAGATGGCGGAGGCCTACAGTGAGATTGGGATGAAAG |
| | | GCGAGCGCCGGAGGGGCAAGGGGCACGATGGCCTTTACCAGGGTCT |
| | | CAGTACAGCCACCAAGGACACCTACGACGCCCTTCACATGCAGGCC |
| | | CTGCCCCCTCGC |
| SEQ ID | CTL019 | DIQMTQTTSSLSASLGDRVTISCRASQDISKYLNWYQQKPDGTVKLLIY |
| NO: 26 | full-length | HTSRLHSGVPSRFSGSGSGTDYSLTISNLEQEDIATYFCQQGNTLPYTFG |
| | amino acid | GGTKLEITGGGGSGGGGSGGGGSEVKLQESGPGLVAPSQSLSVTCTVS |
| | sequence | GVSLPDYGVSWIRQPPRKGLEWLGVIWGSETTYYNSALKSRLTIIKDNS |
| | | KSQVFLKMNSLQTDDTAIYYCAKHYYYGGSYAMDYWGQGTSVTVSS |
| | | TTTPAPRPPTPAPTIASQPLSLRPEACRPAAGGAVHTRGLDFACDIYIWA |
| | | PLAGTCGVLLLSLVITLYCKRGRKKLLYIFKQPFMRPVQTTQEEDGCSC |
| | | RFPEEEEGGCELRVKFSRSADAPAYKQGQNQLYNELNLGRREEYDVLD |
| | | KRRGRDPEMGGKPRRKNPQEGLYNELQKDKMAEAYSEIGMKGERRR |
| | | GKGHDGLYQGLSTATKDTYDALHMQALPPR |

TABLE 2
Exemplary sequences of various components of CAR
(aa-amino acid sequence, na-nucleic acid sequence).

| SEQ ID | | |
|---|---|---|
| NO: | description | Sequence |
| SEQ ID | EF-1 | CGTGAGGCTCCGGTGCCCGTCAGTGGGCAGAGCGCACATCGCCC |
| NO: 1014 | promoter | ACAGTCCCCGAGAAGTTGGGGGGAGGGGTCGGCAATTGAACCG |
| | | GTGCCTAGAGAAGGTGGCGCGGGGTAAACTGGGAAAGTGATGT |
| | | CGTGTACTGGCTCCGCCTTTTTCCCGAGGGTGGGGGAGAACCGT |
| | | ATATAAGTGCAGTAGTCGCCGTGAACGTTCTTTTTCGCAACGGGT |
| | | TTGCCGCCAGAACACAGGTAAGTGCCGTGTGTGGTTCCCGCGGG |
| | | CCTGGCCTCTTTACGGGTTATGGCCCTTGCGTGCCTTGAATTACT |
| | | TCCACCTGGCTGCAGTACGTGATTCTTGATCCCGAGCTTCGGGTT |
| | | GGAAGTGGGTGGGAGAGTTCGAGGCCTTGCGCTTAAGGAGCCCC |
| | | TTCGCCTCGTGCTTGAGTTGAGGCCTGGCCTGGGCGCTGGGGCC |
| | | GCCGCGTGCGAATCTGGTGGCACCTTCGCGCCTGTCTCGCTGCTT |
| | | TCGATAAGTCTCTAGCCATTTAAAATTTTTGATGACCTGCTGCGA |
| | | CGCTTTTTTTCTGGCAAGATAGTCTTGTAAATGCGGGCCAAGATC |
| | | TGCACACTGGTATTTCGGTTTTTGGGGCCGCGGGCGGCGACGGG |
| | | GCCCGTGCGTCCCAGCGCACATGTTCGGCGAGGCGGGGCCTGCG |
| | | AGCGCGGCCACCGAGAATCGGACGGGGGTAGTCTCAAGCTGGCC |
| | | GGCCTGCTCTGGTGCCTGGCCTCGCGCCGCCGTGTATCGCCCCGC |
| | | CCTGGGCGGCAAGGCTGGCCCGGTCGGCACCAGTTGCGTGAGCG |
| | | GAAAGATGGCCGCTTCCCGGCCCTGCTGCAGGGAGCTCAAAATG |
| | | GAGGACGCGGCGCTCGGGAGAGCGGGCGGGTGAGTCACCCACA |
| | | CAAAGGAAAAGGGCCTTTCCGTCCTCAGCCGTCGCTTCATGTGA |
| | | CTCCACGGAGTACCGGGCGCCGTCCAGGCACCTCGATTAGTTCT |
| | | CGAGCTTTTGGAGTACGTCGTCTTTAGGTTGGGGGGAGGGGTTTT |
| | | ATGCGATGGAGTTTCCCCACACTGAGTGGGTGGAGACTGAAGTT |
| | | AGGCCAGCTTGGCACTTGATGTAATTCTCCTTGGAATTTGCCCTT |
| | | TTTGAGTTTGGATCTTGGTTCATTCTCAAGCCTCAGACAGTGGTT |
| | | CAAAGTTTTTTTCTTCCATTTCAGGTGTCGTGA |
| SEQ ID | Leader (aa) | MALPVTALLLPLALLLHAARP |
| NO: 1015 | | |
| SEQ ID | Leader (na) | ATGGCCCTGCCTGTGACAGCCCTGCTGCTGCCTCTGGCTCTGCTG |
| NO: 1016 | | CTGCATGCCGCTAGACCC |
| SEQ ID | Leader (na) | ATGGCCCTCCCTGTCACCGCCCTGCTGCTTCCGCTGGCTCTTCTG |
| NO: 1017 | | CTCCACGCCGCTCGGCCC |
| SEQ ID | Leader (aa) | MLLLVTSLLLCELPHPAFLLIP |
| NO: 3204 | | |
| SEQ ID | Leader (na) | ATGCTTCTCCTGGTGACAAGCCTTCTGCTCTGTGAGTTACCACAC |
| NO: 3205 | | CCAGCATTCCTCCTGATCCCA |
| SEQ ID | Leader (na) | ATGCTGCTGCTGGTGACCAGCCTGCTGCTGTGCGAGCTGCCCCAC |
| NO: 3206 | | CCCGCCTTTCTGCTGATCCCC |
| SEQ ID | CD8 hinge | TTTPAPRPPTPAPTIASQPLSLRPEACRPAAGGAVHTRGLDFACD |
| NO: 1018 | (aa) | |
| SEQ ID | CD8 hinge | ACCACGACGCCAGCGCCGCGACCACCAACACCGGCGCCCACCAT |
| NO: 1019 | (na) | CGCGTCGCAGCCCCTGTCCCTGCGCCCAGAGGCGTGCCGGCCAG |
| | | CGGCGGGGGGCGCAGTGCACACGAGGGGGCTGGACTTCGCCTGT |
| | | GAT |
| SEQ ID | Ig4 hinge | ESKYGPPCPPCPAPEFLGGPSVFLFPPKPKDTLMISRTPEVTCVVVDV |
| NO: 1020 | (aa) | SQEDPEVQFNWYVDGVEVHNAKTKPREEQFNSTYRVVSVLTVLHQ |
| | | DWLNGKEYKCKVSNKGLPSSIEKTISKAKGQPREPQVYTLPPSQEE |
| | | MTKNQVSLTCLVKGFYPSDIAVEWESNGQPENNYKTTPPVLDSDGS |
| | | FFLYSRLTVDKSRWQEGNVFSCSVMHEALHNHYTQKSLSLSLGKM |
| SEQ ID | Ig4 hinge | GAGAGCAAGTACGGCCCTCCCTGCCCCCCTTGCCCTGCCCCCGA |
| NO: 1021 | (na) | GTTCCTGGGCGGACCCAGCGTGTTCCTGTTCCCCCCCAAGCCCAA |
| | | GGACACCCTGATGATCAGCCGGACCCCCGAGGTGACCTGTGTGG |
| | | TGGTGGACGTGTCCCAGGAGGACCCCGAGGTCCAGTTCAACTGG |
| | | TACGTGGACGGCGTGGAGGTGCACAACGCCAAGACCAAGCCCC |
| | | GGGAGGAGCAGTTCAATAGCACCTACCGGGTGGTGTCCGTGCTG |
| | | ACCGTGCTGCACCAGGACTGGCTGAACGGCAAGGAATACAAGTG |
| | | TAAGGTGTCCAACAAGGGCCTGCCCAGCAGCATCGAGAAAACCA |
| | | TCAGCAAGGCCAAGGGCCAGCCTCGGGAGCCCCAGGTGTACACC |
| | | CTGCCCCCTAGCCAAGAGGAGATGACCAAGAACCAGGTGTCCCT |
| | | GACCTGCCTGGTGAAGGGCTTCTACCCCAGCGACATCGCCGTGG |
| | | AGTGGGAGAGCAACGGCCAGCCCGAGAACAACTACAAGACCAC |
| | | CCCCCCTGTGCTGGACAGCGACGGCAGCTTCTTCCTGTACAGCCG |
| | | GCTGACCGTGGACAAGAGCCGGTGGCAGGAGGGCAACGTCTTTA |
| | | GCTGCTCCGTGATGCACGAGGCCCTGCACAACCACTACACCCAG |
| | | AAGAGCCTGAGCCTGTCCCTGGGCAAGATG |
| SEQ ID | IgD hinge | RWPESPKAQASSVPTAQPQAEGSLAKATTAPATTRNTGRGGEEKK |
| NO: 1022 | (aa) | KEKEKEEQEERETKTPECPSHTQPLGVYLLTPAVQDLWLRDKATFT |
| | | CFVVGSDLKDAHLTWEVAGKVPTGGVEEGLLERHSNGSQSQHSRL |
| | | TLPRSLWNAGTSVTCTLNHPSLPPQRLMALREPAAQAPVKLSLNLL |
| | | ASSDPPEAASWLLCEVSGFSPPNILLMWLEDQREVNTSGFAPARPPP |
| | | QPGSTTFWAWSVLRVPAPPSPQPATYTCVVSHEDSRTLLNASRSLE |
| | | VSYVTDH |
| SEQ ID | IgD hinge | AGGTGGCCCGAAAGTCCCAAGGCCCAGGCATCTAGTGTTCCTAC |
| NO: 1023 | (na) | TGCACAGCCCCAGGCAGAAGGCAGCCTAGCCAAAGCTACTACTG |
| | | CACCTGCCACTACGCGCAATACTGGCCGTGGCGGGGAGGAGAAG |
| | | AAAAAGGAGAAAGAGAAAGAAGAACAGGAAGAGAGGGAGACC |
| | | AAGACCCCTGAATGTCCATCCCATACCCAGCCGCTGGGCGTCTA |
| | | TCTCTTGACTCCCGCAGTACAGGACTTGTGGCTTAGAGATAAGG |
| | | CCACCTTTACATGTTTCGTCGTGGGCTCTGACCTGAAGGATGCCC |
| | | ATTTGACTTGGGAGGTTGCCGGAAAGGTACCCACAGGGGGGGTT |
| | | GAGGAAGGGTTGCTGGAGCGCCATTCCAATGGCTCTCAGAGCCA |
| | | GCACTCAAGACTCACCCTTCCGAGATCCCTGTGGAACGCCGGGA |
| | | CCTCTGTCACATGTACTCTAAATCATCCTAGCCTGCCCCCACAGC |
| | | GTCTGATGGCCCTTAGAGAGCCAGCCGCCCAGGCACCAGTTAAG |
| | | CTTAGCCTGAATCTGCTCGCCAGTAGTGATCCCCCAGAGGCCGC |
| | | CAGCTGGCTCTTATGCGAAGTGTCCGGCTTTAGCCCGCCCAACAT |
| | | CTTGCTCATGTGGCTGGAGGACCAGCGAGAAGTGAACACCAGCG |
| | | GCTTCGCTCCAGCCCGGCCCCCACCCCAGCCGGGTTCTACCACAT |
| | | TCTGGGCCTGGAGTGTCTTAAGGGTCCCAGCACCACCTAGCCCC |
| | | CAGCCAGCCACATACACCTGTGTTGTGTCCCATGAAGATAGCAG |
| | | GACCCTGCTAAATGCTTCTAGGAGTCTGGAGGTTTCCTACGTGAC |
| | | TGACCATT |
| SEQ ID | GS | GGGGSGGGGS |
| NO: 1024 | hinge/linker | |
| | (aa) | |
| SEQ ID | GS | GGTGGCGGAGGTTCTGGAGGTGGAGGTTCC |
| NO: 1025 | hinge/linker | |
| | (na) | |
| SEQ ID | CD8 | IYIWAPLAGTCGVLLLSLVITLYC |
| NO: 1026 | transmembrane | |
| | (TM) (aa) | |
| SEQ ID | CD8 | ATCTACATCTGGGCGCCCTTGGCCGGGACTTGTGGGGTCCTTCTC |
| NO: 1027 | transmembrane | CTGTCACTGGTTATCACCCTTTACTGC |
| | (TM) (na) | |
| SEQ ID | CD8 TM (na) | ATCTACATTTGGGCCCCTCTGGCTGGTACTTGCGGGGTCCTGCTG |
| NO: 1028 | | CTTTCACTCGTGATCACTCTTTACTGT |
| SEQ ID | 4-1BB | KRGRKKLLYIFKQPFMRPVQTTQEEDGCSCRFPEEEEGGCEL |
| NO: 1029 | intracellular | |
| | domain (aa) | |
| SEQ ID | 4-1BB | AAACGGGGCAGAAAGAAACTCCTGTATATATTCAAACAACCATT |
| NO: 1030 | intracellular | TATGAGACCAGTACAAACTACTCAAGAGGAAGATGGCTGTAGCT |
| | domain (na) | GCCGATTTCCAGAAGAAGAAGAAGGAGGATGTGAACTG |
| SEQ ID | 4-1BB | AAGCGCGGTCGGAAGAAGCTGCTGTACATCTTTAAGCAACCCTT |
| NO: 1031 | intracellular | CATGAGGCCTGTGCAGACTACTCAAGAGGAGGACGGCTGTTCAT |
| | domain (na) | GCCGGTTCCCAGAGGAGGAGGAAGGCGGCTGCGAACTG |
| SEQ ID | CD27 (aa) | QRRKYRSNKGESPVEPAEPCRYSCPREEEGSTIPIQEDYRKPEPACSP |
| NO: 1032 | | |
| SEQ ID | CD27 (na) | AGGAGTAAGAGGAGCAGGCTCCTGCACAGTGACTACATGAACAT |
| NO: 1033 | | GACTCCCCGCCGCCCCGGGCCCACCCGCAAGCATTACCAGCCCT |
| | | ATGCCCCACCACGCGACTTCGCAGCCTATCGCTCC |
| SEQ ID | CD3-zeta | RVKFSRSADAPAYKQGQNQLYNELNLGRREEYDVLDKRRGRDPE |
| NO: 1034 | (aa) | MGGKPRRKNPQEGLYNELQKDKMAEAYSEIGMKGERRRGKGHDG |
| | | LYQGLSTATKDTYDALHMQALPPR |
| SEQ ID | CD3-zeta | AGAGTGAAGTTCAGCAGGAGCGCAGACGCCCCCGCGTACAAGC |
| NO: 1035 | (na) | AGGGCCAGAACCAGCTCTATAACGAGCTCAATCTAGGACGAAGA |
| | | GAGGAGTACGATGTTTTGGACAAGAGACGTGGCCGGGACCCTGA |
| | | GATGGGGGGAAAGCCGAGAAGGAAGAACCCTCAGGAAGGCCTG |
| | | TACAATGAACTGCAGAAAGATAAGATGGCGGAGGCCTACAGTG |
| | | AGATTGGGATGAAAGGCGAGCGCCGGAGGGGCAAGGGGCACGA |
| | | TGGCCTTTACCAGGGTCTCAGTACAGCCACCAAGGACACCTACG |
| | | ACGCCCTTCACATGCAGGCCCTGCCCCCTCGC |
| SEQ ID | CD3-zeta | CGCGTGAAATTCAGCCGCAGCGCAGATGCTCCAGCCTACAAGCA |
| NO: 1036 | (na) | GGGGCAGAACCAGCTCTACAACGAACTCAATCTTGGTCGGAGAG |
| | | AGGAGTACGACGTGCTGGACAAGCGGAGAGGACGGGACCCAGA |
| | | AATGGGCGGGAAGCCGCGCAGAAAGAATCCCCAAGAGGGCCTG |
| | | TACAACGAGCTCCAAAAGGATAAGATGGCAGAAGCCTATAGCG |
| | | AGATTGGTATGAAAGGGGAACGCAGAAGAGGCAAAGGCCACGA |
| | | CGGACTGTACCAGGGACTCAGCACCGCCACCAAGGACACCTATG |
| | | ACGCTCTTCACATGCAGGCCCTGCCGCCTCGG |
| SEQ ID | CD3-zeta | RVKFSRSADAPAYQQGQNQLYNELNLGRREEYDVLDKRRGRDPE |
| NO: 1037 | (aa) | MGGKPRRKNPQEGLYNELQKDKMAEAYSEIGMKGERRRGKGHDG |
| | | LYQGLSTATKDTYDALHMQALPPR |
| SEQ ID | CD3-zeta | AGAGTGAAGTTCAGCAGGAGCGCAGACGCCCCCGCGTACCAGC |
| NO: 1038 | (na) | AGGGCCAGAACCAGCTCTATAACGAGCTCAATCTAGGACGAAGA |
| | | GAGGAGTACGATGTTTTGGACAAGAGACGTGGCCGGGACCCTGA |
| | | GATGGGGGGAAAGCCGAGAAGGAAGAACCCTCAGGAAGGCCTG |
| | | TACAATGAACTGCAGAAAGATAAGATGGCGGAGGCCTACAGTG |
| | | AGATTGGGATGAAAGGCGAGCGCCGGAGGGGCAAGGGGCACGA |
| | | TGGCCTTTACCAGGGTCTCAGTACAGCCACCAAGGACACCTACG |
| | | ACGCCCTTCACATGCAGGCCCTGCCCCCTCGC |
| SEQ ID | linker | GGGGS |
| NO: 1039 | | |
| SEQ ID | linker | GGTGGCGGAGGTTCTGGAGGTGGAGGTTCC |
| NO: 1040 | | |
| SEQ ID | PD-1 | Pgwfldspdrpwnpptfspallvvtegdnatftcsfsntsesfvlnwyrmspsnqtdklaafpedrsq |
| NO: 1041 | extracellular | pgqdcrfrvtqlpngrdfhmsvvrarrndsgtylegaislapkaqikeslraelrvterraevptahp |
| | domain (aa) | spsprpagqfqtlv |
| SEQ ID | PD-1 | Cccggatggtttctggactctccggatcgcccgtggaatcccccaaccttctcaccggcactcttggt |
| NO: 1042 | extracellular | tgtgactgagggcgataatgcgaccttcacgtgctcgttctccaacacctccgaatcattcgtgctga |
| | domain (na) | actggtaccgcatgagcccgtcaaaccagaccgacaagctcgccgcgtttccggaagatcggtcgcaa |
| | | ccgggacaggattgtcggttccgcgtgactcaactgccgaatggcagagacttccacatgagcgtggt |
| | | ccgcgctaggcgaaacgactccgggacctacctgtgcggagccatctcgctggcgcctaaggcccaaa |
| | | tcaaagagagcttgagggccgaactgagagtgaccgagcgcagagctgaggtgccaactgcacatcca |
| | | tccccatcgcctcggcctgcggggcagtttcagaccctggtc |
| SEQ ID | PD-1 CAR | Malpvtalllplalllhaarppgwfldspdrpwnpptfspallvvtegdnatftcsfsntsesfvlnw |
| NO: 1043 | (aa) with | yrmspsnqtdklaafpedrsqpgqdcrfrvtqlpngrdfhmsvvrarrndsgtylcgaislapkaqik |
| | signal | eslraelrvterraevptahpspsprpagqfqtlvtttpaprpptpaptiasqplslrpeacrpaagg |
| | | avhtrgldfacdiyiwaplagtcgvlllslvitlyckrgrkkllyifkqpfmrpvqttqeedgcscrf |
| | | peeeeggcelrvkfsrsadapaykqgqnqlynelnlgrreeydvldkrrgrdpemggkprrknpqegl |
| | | ynelqkdkmaeayseigmkgerrrgkghdglyqglstatkdtydalhmqalppr |
| SEQ ID | PD-1 CAR | Atggccctccctgtcactgccctgcttctccccctcgcactcctgctccacgccgctagaccacccgg |
| NO: 1044 | (na) | atggtttctggactctccggatcgcccgtggaatcccccaaccttctcaccggcactcttggttgtga |
| | | ctgagggcgataatgcgaccttcacgtgctcgttctccaacacctccgaatcattcgtgctgaactgg |
| | | taccgcatgagcccgtcaaaccagaccgacaagctcgccgcgtttccggaagatcggtcgcaaccggg |
| | | acaggattgtcggttccgcgtgactcaactgccgaatggcagagacttccacatgagcgtggtccgcg |
| | | ctaggcgaaacgactccgggacctacctgtgcggagccatctcgctggcgcctaaggcccaaatcaaa |
| | | gagagcttgagggccgaactgagagtgaccgagcgcagagctgaggtgccaactgcacatccatcccc |
| | | atcgcctcggcctgcggggcagtttcagaccctggtcacgaccactccggcgccgcgcccaccgactc |
| | | cggccccaactatcgcgagccagcccctgtcgctgaggccggaagcatgccgccctgccgccggaggt |
| | | gctgtgcatacccggggattggacttcgcatgcgacatctacatttgggctcctctcgccggaacttg |
| | | tggcgtgctccttctgtccctggtcatcaccctgtactgcaagcggggtcggaaaaagcttctgtaca |
| | | ttttcaagcagcccttcatgaggcccgtgcaaaccacccaggaggaggacggttgctcctgccggttc |
| | | cccgaagaggaagaaggaggttgcgagctgcgcgtgaagttctcccggagcgccgacgcccccgccta |
| | | taagcagggccagaaccagctgtacaacgaactgaacctgggacggcgggaagagtacgatgtgctgg |
| | | acaagcggcgcggccgggaccccgaaatgggcgggaagcctagaagaaagaaccctcaggaaggcctg |
| | | tataacgagctgcagaaggacaagatggccgaggcctactccgaaattgggatgaagggagagcggcg |
| | | gaggggaaaggggcacgacggcctgtaccaaggactgtccaccgccaccaaggacacatacgatgccc |
| | | tgcacatgcaggcccttccccctcgc |
| SEQ ID | linker | (Gly-Gly-Gly-Ser)n, where n = 1-10 |
| NO: 3200 | | |
| SEQ ID | linker | (Gly4 Ser)4 |
| NO: 1010 | | |
| SEQ ID | linker | (Gly4 Ser)3 |
| NO: 1011 | | |
| SEQ ID | linker | (Gly3Ser) |
| NO: 1012 | | |
| SEQ ID | linker | ASGGGGSGGRASGGGGS |
| NO: 1045 | | |
| SEQ ID | polyA | [a]₅₀₋₅₀₀₀ |
| NO: 1013 | | |
| SEQ ID | PD1 CAR | Pgwfldspdrpwnpptfspallvvtegdnatftcsfsntsesfvlnwyrmspsnqtdklaafpedrsq |
| NO: 1046 | (aa) | pgqdcrfrvtqlpngrdfhmsvvrarrndsgtylcgaislapkaqikeslraelrvterraevptahp |
| | | spsprpagqfqtlvtttpaprpptpaptiasqplslrpeacrpaaggavhtrgldfacdiyiwaplag |
| | | tcgvlllslvitlyckrgrkkllyifkqpfmrpvqttqeedgcscrfpeeeeggcelrvkfsrsadap |
| | | aykqgqnqlynelnlgrreeydvldkrrgrdpemggkprrknpqeglynelqkdkmaeayseigmkge |
| | | rrrgkghdglyqglstatkdtydalhmqalppr |
| SEQ ID | ICOS | TKKKYSSSVHDPNGEYMFMRAVNTAKKSRLTDVTL |
| NO: 1047 | intracellular | |
| | domain (aa) | |
| SEQ ID | ICOS | ACAAAAAAGAAGTATTCATCCAGTGTGCACGACCCTAACGGTGA |
| NO: 1048 | intracellular | ATACATGTTCATGAGAGCAGTGAACACAGCCAAAAAATCCAGAC |
| | domain (na) | TCACAGATGTGACCCTA |
| SEQ ID | ICOS TM | TTTPAPRPPTPAPTIASQPLSLRPEACRPAAGGAVHTRGLDFACDFW |
| NO: 1049 | domain (aa) | LPIGCAAFVVVCILGCILICWL |
| SEQ ID | ICOS TM | ACCACGACGCCAGCGCCGCGACCACCAACACCGGCGCCCACCAT |
| NO: 1050 | domain (na) | CGCGTCGCAGCCCCTGTCCCTGCGCCCAGAGGCGTGCCGGCCAG |
| | | CGGCGGGGGGCGCAGTGCACACGAGGGGGCTGGACTTCGCCTGT |
| | | GATTICTGGTTACCCATAGGATGTGCAGCCTTTGTTGTAGTCTGC |
| | | ATTTTGGGATGCATACTTATTTGTTGGCTT |
| SEQ ID | CD28 | RSKRSRLLHSDYMNMTPRRPGPTRKHYQPYAPPRDFAAYRS |
| NO: 1051 | intracellular | |
| | domain (aa) | |
| SEQ ID | CD28 | AGGAGTAAGAGGAGCAGGCTCCTGCACAGTGACTACATGAACAT |
| NO: 1052 | intracellular | GACTCCCCGCCGCCCCGGGCCCACCCGCAAGCATTACCAGCCCT |
| | domain (na) | ATGCCCCACCACGCGACTTCGCAGCCTATCGCTCC |

### CAR Antigen Binding Domain

[0343] In some embodiments, the portion of the CAR molecule comprising the antigen-binding domain comprises an antigen-binding domain that targets a tumor antigen, e.g., a tumor antigen described herein. In some embodiments, the antigen binding domain binds to: CD19; CD123; CD22; CD30; CD171; CS-1; C-type lectin-like molecule-1, CD33; epidermal growth factor receptor variant III (EGFRvIII); ganglioside G2 (GD2); ganglioside GD3; TNF receptor family member; B-cell maturation antigen (BCMA); Tn antigen ((Tn Ag) or (GalNAca-Ser/Thr)); prostate-specific membrane antigen (PSMA); Receptor tyrosine kinase-like orphan receptor 1 (ROR1); Fms-Like Tyrosine Kinase 3 (FLT3); Tumor-associated glycoprotein 72 (TAG72); CD38; CD44v6; Carcinoembryonic antigen (CEA); Epithelial cell adhesion molecule (EPCAM); B7H3 (CD276); KIT (CD117); Interleukin-13 receptor subunit alpha-2; Mesothelin; Interleukin 11 receptor alpha (IL-11Ra); prostate stem cell antigen (PSCA); Protease Serine 21; vascular endothelial growth factor receptor 2 (VEGFR2); Lewis(Y) antigen; CD24; Platelet-derived growth factor receptor beta (PDGFR-beta); Stage-specific embryonic antigen-4 (SSEA-4); CD20; Folate receptor alpha; Receptor tyrosine-protein kinase ERBB2 (Her2/neu); Mucin 1, cell surface associated (MUC1); epidermal growth factor receptor (EGFR); neural cell adhesion molecule (NCAM); Prostase; prostatic acid phosphatase (PAP); elongation factor 2 mutated (ELF2M); Ephrin B2; fibroblast activation protein alpha (FAP); insulin-like growth factor 1 receptor (IGF-I receptor), carbonic anhydrase IX (CAIX); Proteasome (Prosome, Macropain) Subunit, Beta Type, 9 (LMP2); glycoprotein 100 (gp100); oncogene fusion protein consisting of breakpoint cluster region (BCR) and Abelson murine leukemia viral oncogene homolog 1 (Abl) (bcr-abl); tyrosinase; ephrin type-A receptor 2 (EphA2); Fucosyl GM1; sialyl Lewis adhesion molecule (sLe); ganglioside GM3; transglutaminase 5 (TGS5); high molecular weight-melanoma-associated antigen (HMWMAA); o-acetyl-GD2 ganglioside (OAcGD2); Folate receptor beta; tumor endothelial marker 1 (TEM1/CD248); tumor endothelial marker 7-related (TEM7R); claudin 6 (CLDN6); thyroid stimulating hormone receptor (TSHR); G protein-coupled receptor class C group 5, member D (GPRC5D); chromosome X open reading frame 61 (CXORF61); CD97; CD179a; anaplastic lymphoma kinase (ALK); Polysialic acid; placenta-specific 1 (PLAC1); hexasaccharide portion of globoH glycoceramide (GloboH); mammary gland differentiation antigen (NY-BR-1); uroplakin 2 (UPK2); Hepatitis A virus cellular receptor 1 (HAVCR1); adrenoceptor beta 3 (ADRB3); pannexin 3 (PANX3); G protein-coupled receptor 20 (GPR20); lymphocyte antigen 6 complex, locus K 9 (LY6K); Olfactory receptor 51E2 (OR51E2); TCR Gamma Alternate Reading Frame Protein (TARP); Wilms tumor protein (WT1); Cancer/testis antigen 1 (NY-ESO-1); Cancer/testis antigen 2 (LAGE-1a); Melanoma-associated antigen 1 (MAGE-A1); ETS translocation-variant gene 6, located on chromosome 12p (ETV6-AML); sperm protein 17 (SPA17); X Antigen Family, Member 1A (XAGE1); angiopoietin-binding cell surface receptor 2 (Tie 2); melanoma cancer testis antigen-1 (MAD-CT-1); melanoma cancer testis antigen-2 (MAD-CT-2); Fos-related antigen 1; tumor protein p53 (p53); p53 mutant; prostein; surviving; telomerase; prostate carcinoma tumor antigen-1, melanoma antigen recognized by T cells 1; Rat sarcoma (Ras) mutant; human Telomerase reverse transcriptase (hTERT); sarcoma translocation breakpoints; melanoma inhibitor of apoptosis (ML-IAP); ERG (transmembrane protease, serine 2 (TMPRSS2) ETS fusion gene); N-Acetyl glucosaminyl-transferase V (NA17); paired box protein Pax-3 (PAX3); Androgen receptor; Cyclin B1; ν-myc avian myelocytomatosis viral oncogene neuroblastoma derived homolog (MYCN); Ras Homolog Family Member C (RhoC); Tyrosinase-related protein 2 (TRP-2); Cytochrome P450 1B1 (CYP1B1); CCCTC-Binding Factor (Zinc Finger Protein)-Like, Squamous Cell Carcinoma Antigen Recognized By T Cells 3 (SART3); Paired box protein Pax-5 (PAX5); proacrosin binding protein sp32 (OY-TES1); lymphocyte-specific protein tyrosine kinase (LCK); A kinase anchor protein 4 (AKAP-4); synovial sarcoma, X breakpoint 2 (SSX2); Receptor for Advanced Glycation Endproducts (RAGE-1); renal ubiquitous 1 (RU1); renal ubiquitous 2 (RU2); legumain; human papilloma virus E6 (HPV E6); human papilloma virus E7 (HPV E7); intestinal carboxyl esterase; heat shock protein 70-2 mutated (mut hsp70-2); CD79a; CD79b; CD72; Leukocyte-associated immunoglobulin-like receptor 1 (LAIR1); Fc fragment of IgA receptor (FCAR or CD89); Leukocyte immunoglobulin-like receptor subfamily A member 2 (LILRA2); CD300 molecule-like family member f (CD300LF); C-type lectin domain family 12 member A (CLECI2A); bone marrow stromal cell antigen 2 (BST2); EGF-like module-containing mucin-like hormone receptor-like 2 (EMR2); lymphocyte antigen 75 (LY75); Glypican-3 (GPC3); Fc receptor-like 5 (FCRL5); or immunoglobulin lambda-like polypeptide 1 (IGLL1).

[0344] The antigen binding domain can be any domain that binds to an antigen, including but not limited to a monoclonal antibody, a polyclonal antibody, a recombinant antibody, a human antibody, a humanized antibody, and a functional fragment thereof, including but not limited to a single-domain antibody such as a heavy chain variable domain (VH), a light chain variable domain (VL) and a variable domain (VHH) of camelid derived nanobody, and to an alternative scaffold known in the art to function as antigen binding domain, such as a recombinant fibronectin domain, a T cell receptor (TCR), or a fragment there of, e.g., single chain TCR, and the like. In some instances, it is beneficial for the antigen-binding domain to be derived from the same species in which the CAR molecule will ultimately be used in. For example, for use in humans, it may be beneficial for the antigen binding domain of the CAR molecule to comprise human or humanized residues for the antigen-binding domain of an antibody or antibody fragment.

[0345] In one embodiment, the CD19 CAR is a CD19 CAR described in U.S. Pat. Nos. 8,399,645; 7,446,190; Xu et al., Leuk Lymphoma. 2013 54(2):255-260(2012); Cruz et al., Blood 122(17):2965-2973 (2013); Brentjens et al., Blood, 118(18):4817-4828 (2011); Kochenderfer et al., Blood 116(20):4099-102 (2010); Kochenderfer et al., Blood 122 (25):4129-39(2013); or 16th Annu Meet Am Soc Gen Cell Ther (ASGCT) (May 15-18, Salt Lake City) 2013, Abst 10 (each of which is herein incorporated by reference in their entirety). In one embodiment, an antigen binding domain against CD19 is an antigen binding portion, e.g., CDRs, of a CAR molecule, antibody or antigen-binding fragment thereof described in, e.g., PCT publication WO2012/079000 (incorporated herein by reference in its entirety). In one embodiment, an antigen binding domain against CD19 is an antigen binding portion, e.g., CDRs, of a CAR molecule, antibody or antigen-binding fragment thereof described in, e.g., PCT publication WO2014/153270; Kochenderfer, J. N. et al., J. Immunother. 32 (7), 689-702 (2009); Kochenderfer, J. N., et al., Blood, 116 (20), 4099-4102 (2010); PCT publication WO2014/031687; Bejcek, Cancer Research, 55, 2346-2351, 1995; or U.S. Pat. No. 7,446,190 (each of which is herein incorporated by reference in their entirety).

[0346] In one embodiment, the antigen binding domain against mesothelin is or may be derived from an antigen binding domain, e.g., CDRs, scFv, or VH and VL, of an antibody, antigen-binding fragment or CAR molecule described in, e.g., PCT publication WO2015/090230 (In one embodiment the CAR molecule is a CAR molecule described in WO2015/090230, the contents of which are incorporated herein in their entirety). In some embodiments, the antigen binding domain against mesothelin is or is derived from an antigen binding portion, e.g., CDRs, scFv, or VH and VL, of an antibody, antigen-binding fragment, or CAR molecule described in, e.g., PCT publication WO1997/025068, WO1999/028471, WO2005/014652, WO2006/099141, WO2009/045957, WO2009/068204, WO2013/142034, WO2013/040557, or WO2013/063419 (each of which is herein incorporated by reference in their entirety).

[0347] In one embodiment, an antigen-binding domain against CD123 is or is derived from an antigen-binding portion, e.g., CDRs, scFv or VH and VL, of an antibody, antigen-binding fragment or CAR molecule described in, e.g., PCT publication WO2014/130635 (incorporated herein by reference in its entirety). In one embodiment, an antigen binding domain against CD123 is or is derived from an antigen binding portion, e.g., CDRs, scFv or VH and VL, of an antibody, antigen-binding fragment or CAR molecule described in, e.g., PCT publication WO2016/028896 (incorporated herein by reference in its entirety); in some embodiments, the CAR molecule is a CAR molecule described in WO2016/028896. In one embodiment, an antigen binding domain against CD123 is or is derived from an antigen binding portion, e.g., CDRs, scFv, or VL and VH, of an antibody, antigen-binding fragment, or CAR molecule described in, e.g., PCT publication WO1997/024373, WO2008/127735 (e.g., a CD123 binding domain of 26292, 32701, 37716 or 32703), WO2014/138805 (e.g., a CD123 binding domain of CSL362), WO2014/138819, WO2013/173820, WO2014/144622, WO2001/66139, WO2010/126066 (e.g., the CD123 binding domain of any of Old4, Old5, O1d17, O1d19, New102, or Old6), WO2014/144622, or US2009/0252742 (each of which is incorporated herein by reference in its entirety).

[0348] In one embodiment, an antigen binding domain against CD22 is an antigen binding portion, e.g., CDRs, of an antibody described in, e.g., Haso et al., Blood, 121(7): 1165-1174 (2013); Wayne et al., Clin Cancer Res 16(6): 1894-1903 (2010); Kato et al., Leuk Res 37(1):83-88 (2013); Creative BioMart (creativebiomart.net): MOM-18047-S(P).

[0349] In one embodiment, an antigen-binding domain against CS-1 is an antigen-binding portion, e.g., CDRs, of Elotuzumab (BMS), see e.g., Tai et al., 2008, Blood 112(4):1329-37; Tai et al., 2007, Blood. 110(5):1656-63.

[0350] In one embodiment, an antigen-binding domain against CLL-1 is an antigen-binding portion, e.g., CDRs or VH and VL, of an antibody, antigen-binding fragment or CAR molecule described in, e.g., PCT publication WO2016/014535, the contents of which are incorporated herein in their entirety. In one embodiment, an antigen binding domain against CLL-1 is an antigen binding portion, e.g., CDRs, of an antibody available from R&D, ebiosciences, Abcam, for example, PE-CLL1-hu Cat #353604 (BioLegend); and PE-CLL1 (CLEC12A) Cat #562566 (BD).

[0351] In one embodiment, an antigen binding domain against CD33 is an antigen binding portion, e.g., CDRs, of an antibody described in, e.g., Bross et al., Clin Cancer Res 7(6):1490-1496 (2001) (Gemtuzumab Ozogamicin, hP67.6), Caron et al., Cancer Res 52(24):6761-6767 (1992) (Lintuzumab, HuM195), Lapusan et al., Invest New Drugs 30(3):1121-1131 (2012) (AVE9633), Aigner et al., Leukemia 27(5): 1107-1115 (2013) (AMG330, CD33 BiTE), Dutour et al., Adv hematol 2012:683065 (2012), and Pizzitola et al., Leukemia doi:10.1038/Lue.2014.62 (2014). Exemplary CAR molecules that target CD33 are described herein, and are provided in WO2016/014576, e.g., in Table 2 of WO2016/014576 (incorporated by reference in its entirety).

[0352] In one embodiment, an antigen binding domain against GD2 is an antigen binding portion, e.g., CDRs, of an antibody described in, e.g., Mujoo et al., Cancer Res. 47(4):1098-1104 (1987); Cheung et al., Cancer Res 45(6):2642-2649 (1985), Cheung et al., J Clin Oncol 5(9):1430-1440 (1987), Cheung et al., J Clin Oncol 16(9):3053-3060 (1998), Handgretinger et al., Cancer Immunol Immunother 35(3):199-204 (1992). In some embodiments, an antigen binding domain against GD2 is an antigen binding portion of an antibody selected from mAb 14.18, 14G2a, ch14.18, hu14.18, 3F8, hu3F8, 3G6, 8B6, 60C3, 10B8, ME36.1, and 8H9, see e.g., WO2012033885, WO2013040371, WO2013192294, WO2013061273, WO2013123061, WO2013074916, and WO201385552. In some embodiments, an antigen binding domain against GD2 is an antigen binding portion of an antibody described in US Publication No.: 20100150910 or PCT Publication No.: WO 2011160119.

[0353] In one embodiment, an antigen binding domain against BCMA is an antigen-binding portion, e.g., CDRs, of an antibody described in, e.g., WO2012163805, WO200112812, and WO2003062401. In some embodiments, additional exemplary BCMA CAR constructs are generated using an antigen binding domain, e.g., CDRs, scFv, or VH and VL sequences from PCT Publication WO2012/0163805 (the contents of which are hereby incorporated by reference in its entirety). In some embodiments, additional exemplary BCMA CAR constructs are generated using an antigen binding domain, e.g., CDRs, scFv, or VH and VL sequences from PCT Publication WO2016/014565 (the contents of which are hereby incorporated by reference in its entirety). In some embodiments, additional exemplary BCMA CAR constructs are generated using an antigen binding domain, e.g., CDRs, scFv, or VH and VL sequences from PCT Publication WO2014/122144 (the contents of which are hereby incorporated by reference in its entirety). In some embodiments, additional exemplary BCMA CAR constructs are generated using the CAR molecules, and/or the BCMA binding domains (e.g., CDRs, scFv, or VH and VL sequences) from PCT Publication WO2016/014789 (the contents of which are hereby incorporated by reference in its entirety). In some embodiments, additional exemplary BCMA CAR constructs are generated using the CAR molecules, and/or the BCMA binding domains (e.g., CDRs, scFv, or VH and VL sequences) from PCT Publication WO2014/089335 (the contents of which are hereby incorporated by reference in its entirety). In some embodiments, additional exemplary BCMA CAR constructs are generated using the CAR molecules, and/or the BCMA binding domains (e.g., CDRs, scFv, or VH and VL sequences) from PCT Publication WO2014/140248 (the contents of which are hereby incorporated by reference in its entirety).

[0354] In one embodiment, an antigen binding domain against Tn antigen is an antigen binding portion, e.g., CDRs, of an antibody described in, e.g., US 2014/0178365, U.S. Pat. No. 8,440,798, Brooks et al., PNAS 107(22):10056-10061 (2010), and Stone et al., Oncolmmunology 1(6):863-873(2012).

[0355] In one embodiment, an antigen binding domain against PSMA is an antigen binding portion, e.g., CDRs, of an antibody described in, e.g., Parker et al., Protein Expr Purif 89(2):136-145 (2013), US 20110268656 (J591 ScFv); Frigerio et al, European J Cancer 49(9):2223-2232 (2013) (scFvD2B); WO 2006125481 (mAbs 3/A12, 3/E7 and 3/F11) and single chain antibody fragments (scFv A5 and D7).

[0356] In one embodiment, an antigen binding domain against ROR1 is an antigen binding portion, e.g., CDRs, of an antibody described in, e.g., Hudecek et al., Clin Cancer Res 19(12):3153-3164 (2013); WO 2011159847; and US20130101607.

[0357] In one embodiment, an antigen-binding domain against FLT3 is an antigen-binding portion, e.g., CDRs, of an antibody described in, e.g., WO2011076922, U.S. Pat. No. 5,777,084, EP0754230, US20090297529, and several commercial catalog antibodies (R&D, ebiosciences, Abcam).

[0358] In one embodiment, an antigen binding domain against TAG72 is an antigen-binding portion, e.g., CDRs, of an antibody described in, e.g., Hombach et al., Gastroenterology 113(4):1163-1170 (1997); and Abcam ab691.

[0359] In one embodiment, an antigen binding domain against FAP is an antigen-binding portion, e.g., CDRs, of an antibody described in, e.g., Ostermann et al., Clinical Cancer Research 14:4584-4592 (2008) (FAP5), US Pat. Publication No. 2009/0304718; sibrotuzumab (see e.g., Hofheinz et al., Oncology Research and Treatment 26(1), 2003); and Tran et al., J Exp Med 210(6):1125-1135 (2013).

[0360] In one embodiment, an antigen binding domain against CD38 is an antigen binding portion, e.g., CDRs, of daratumumab (see, e.g., Groen et al., Blood 116(21):1261-1262 (2010); MOR202 (see, e.g., U.S. Pat. No. 8,263,746); or antibodies described in U.S. Pat. No. 8,362,211.

[0361] In one embodiment, an antigen binding domain against CD44v6 is an antigen-binding portion, e.g., CDRs, of an antibody described in, e.g., Casucci et al., Blood 122(20):3461-3472 (2013).

[0362] In one embodiment, an antigen binding domain against CEA is an antigen-binding portion, e.g., CDRs, of an antibody described in, e.g., Chmielewski et al., Gastoenterology 143(4):1095-1107 (2012).

[0363] In one embodiment, an antigen-binding domain against EPCAM is an antigen-binding portion, e.g., CDRS, of an antibody selected from MT110, EpCAM-CD3 bispecific Ab (see, e.g., clinicaltrials.gov/ct2/show/NCT00635596); Edrecolomab; 3622W94; ING-1; and adecatumumab (MT201).

[0364] In one embodiment, an antigen-binding domain against PRSS21 is an antigen-binding portion, e.g., CDRS, of an antibody described in U.S. Pat. No. 8,080,650.

[0365] In one embodiment, an antigen-binding domain against B7H3 is an antigen-binding portion, e.g., CDRS, of an antibody MGA271 (Macrogenics).

[0366] In one embodiment, an antigen-binding domain against KIT is an antigen-binding portion, e.g., CDRS, of an antibody described in, e.g., U.S. Pat. No. 7,915,391, US20120288506, and several commercial catalog antibodies.

[0367] In one embodiment, an antigen-binding domain against IL-13Ra2 is an antigen-binding portion, e.g., CDRs, of an antibody described in, e.g., WO2008/146911, WO2004087758, several commercial catalog antibodies, and WO2004087758.

[0368] In one embodiment, an antigen-binding domain against CD30 is an antigen-binding portion, e.g., CDRS, of an antibody described in, e.g., U.S. Pat. No. 7,090,843 B1, and EP0805871.

[0369] In one embodiment, an antigen-binding domain against GD3 is an antigen-binding portion, e.g., CDRs, of an antibody described in, e.g., U.S. Pat. Nos. 7,253,263; 8,207,308; US 20120276046; EP1013761; WO2005035577; and U.S. Pat. No. 6,437,098.

[0370] In one embodiment, an antigen binding domain against CD171 is an antigen binding portion, e.g., CDRS, of an antibody described in, e.g., Hong et al., J Immunother 37(2):93-104 (2014).

[0371] In one embodiment, an antigen-binding domain against IL-11Ra is an antigen-binding portion, e.g., CDRs, of an antibody available from Abcam (cat #ab55262) or Novus Biologicals (cat #EPR5446). In another embodiment, an antigen binding domain again IL-11Ra is a peptide, see, e.g., Huang et al., Cancer Res 72(1):271-281 (2012).

[0372] In one embodiment, an antigen binding domain against PSCA is an antigen binding portion, e.g., CDRs, of an antibody described in, e.g., Morgenroth et al., Prostate 67(10):1121-1131(2007) (scFv 7F5); Nejatollahi et al., J of Oncology 2013(2013), article ID 839831 (scFv C5-II); and US Pat Publication No. 20090311181.

[0373] In one embodiment, an antigen binding domain against VEGFR2 is an antigen binding portion, e.g., CDRs, of an antibody described in, e.g., Chinnasamy et al., J Clin Invest 120(11):3953-3968 (2010).

[0374] In one embodiment, an antigen binding domain against LewisY is an antigen binding portion, e.g., CDRs, of an antibody described in, e.g., Kelly et al., Cancer Biother Radiopharm 23(4):411-423 (2008) (hu3S193 Ab (scFvs)); Dolezal et al., Protein Engineering 16(1):47-56 (2003) (NC10 scFv).

[0375] In one embodiment, an antigen binding domain against CD24 is an antigen binding portion, e.g., CDRs, of an antibody described in, e.g., Maliar et al., Gastroenterology 143(5):1375-1384 (2012).

[0376] In one embodiment, an antigen-binding domain against PDGFR-beta is an antigen-binding portion, e.g., CDRs, of an antibody Abcam ab32570.

[0377] In one embodiment, an antigen binding domain against SSEA-4 is an antigen binding portion, e.g., CDRs, of antibody MC813 (Cell Signaling), or other commercially available antibodies.

[0378] In one embodiment, an antigen-binding domain against CD20 is an antigen-binding portion, e.g., CDRs, of the antibody Rituximab, Ofatumumab, Ocrelizumab, Veltuzumab, or GA101.

[0379] In one embodiment, an antigen binding domain against Folate receptor alpha is an antigen binding portion, e.g., CDRs, of the antibody IMGN853, or an antibody described in US20120009181; U.S. Pat. No. 4,851,332, LK26: U.S. Pat. No. 5,952,484.

[0380] In one embodiment, an antigen binding domain against ERBB2 (Her2/neu) is an antigen-binding portion, e.g., CDRs, of the antibody trastuzumab, or pertuzumab.

[0381] In one embodiment, an antigen-binding domain against MUC1 is an antigen-binding portion, e.g., CDRs, of the antibody SAR566658.

[0382] In one embodiment, the antigen-binding domain against EGFR is antigen-binding portion, e.g., CDRs, of the antibody cetuximab, panitumumab, zalutumumab, nimotuzumab, or matuzumab. In one embodiment, the antigen binding domain against EGFRvIII is or may be derived from an antigen binding domain, e.g., CDRs, scFv, or VH and VL, of an antibody, antigen-binding fragment or CAR molecule described in, e.g., PCT publication WO2014/130657 (In one embodiment the CAR molecule is a CAR molecule described in WO2014/130657, the contents of which are incorporated herein in their entirety).

[0383] In one embodiment, an antigen binding domain against NCAM is an antigen binding portion, e.g., CDRs, of the antibody clone 2-2B: MAB5324 (EMD Millipore)

[0384] In one embodiment, an antigen binding domain against Ephrin B2 is an antigen binding portion, e.g., CDRs, of an antibody described in, e.g., Abengozar et al., Blood 119(19):4565-4576 (2012).

[0385] In one embodiment, an antigen binding domain against IGF-I receptor is an antigen binding portion, e.g., CDRs, of an antibody described in, e.g., U.S. Pat. No. 8,344,112 B2; EP2322550 A1; WO 2006/138315, or PCT/US2006/022995.

[0386] In one embodiment, an antigen-binding domain against CAIX is an antigen-binding portion, e.g., CDRs, of the antibody clone 303123 (R&D Systems).

[0387] In one embodiment, an antigen-binding domain against LMP2 is an antigen-binding portion, e.g., CDRs, of an antibody described in, e.g., U.S. Pat. No. 7,410,640, or US20050129701.

[0388] In one embodiment, an antigen-binding domain against gp100 is an antigen-binding portion, e.g., CDRs, of the antibody HMB45, NKIbetaB, or an antibody described in WO2013165940, or US20130295007.

[0389] In one embodiment, an antigen-binding domain against tyrosinase is an antigen-binding portion, e.g., CDRs, of an antibody described in, e.g., U.S. Pat. No. 5,843,674; or U.S. Ser. No. 19/950,504,048.

[0390] In one embodiment, an antigen binding domain against EphA2 is an antigen binding portion, e.g., CDRs, of an antibody described in, e.g., Yu et al., Mol Ther 22(1):102-111 (2014).

[0391] In one embodiment, an antigen-binding domain against GD3 is an antigen-binding portion, e.g., CDRs, of an antibody described in, e.g., U.S. Pat. Nos. 7,253,263; 8,207,308; US 20120276046; EP1013761 A3; 20120276046; WO2005035577; or U.S. Pat. No. 6,437,098.

[0392] In one embodiment, an antigen-binding domain against fucosyl GM1 is an antigen-binding portion, e.g., CDRs, of an antibody described in, e.g., US20100297138; or WO2007/067992.

[0393] In one embodiment, an antigen binding domain against sLe is an antigen binding portion, e.g., CDRs, of the antibody G193 (for lewis Y), see Scott AM et al, Cancer Res 60: 3254-61 (2000), also as described in Neeson et al, J Immunol May 2013 190 (Meeting Abstract Supplement) 177.10.

[0394] In one embodiment, an antigen-binding domain against GM3 is an antigen-binding portion, e.g., CDRs, of the antibody CA 2523449 (mAb 14F7).

[0395] In one embodiment, an antigen binding domain against HMWMAA is an antigen binding portion, e.g., CDRs, of an antibody described in, e.g., Kmiecik et al., Oncoimmunology 3(1):e27185 (2014) (PMID: 24575382) (mAb9.2.27); U.S. Pat. No. 6,528,481; WO2010033866; or US 20140004124.

[0396] In one embodiment, an antigen-binding domain against o-acetyl-GD2 is an antigen-binding portion, e.g., CDRs, of the antibody 8B6.

[0397] In one embodiment, an antigen binding domain against TEM1/CD248 is an antigen binding portion, e.g., CDRs, of an antibody described in, e.g., Marty et al., Cancer Lett 235(2):298-308 (2006); Zhao et al., J Immunol Methods 363(2):221-232 (2011).

[0398] In one embodiment, an antigen binding domain against CLDN6 is an antigen binding portion, e.g., CDRs, of the antibody IMABO27 (Ganymed Pharmaceuticals), see e.g., clinicaltrial.gov/show/NCT02054351.

[0399] In one embodiment, an antigen-binding domain against TSHR is an antigen-binding portion, e.g., CDRs, of an antibody described in, e.g., U.S. Pat. Nos. 8,603,466; 8,501,415; or U.S. Pat. No. 8,309,693.

[0400] In one embodiment, an antigen-binding domain against GPRC5D is an antigen binding portion, e.g., CDRs, of the antibody FAB6300A (R&D Systems); or LS-A4180 (Lifespan Biosciences).

[0401] In one embodiment, an antigen binding domain against CD97 is an antigen binding portion, e.g., CDRs, of an antibody described in, e.g., U.S. Pat. No. 6,846,911; de Groot et al., J Immunol 183(6):4127-4134 (2009); or an antibody from R&D:MAB3734.

[0402] In one embodiment, an antigen-binding domain against ALK is an antigen binding portion, e.g., CDRs, of an antibody described in, e.g., Mino-Kenudson et al., Clin Cancer Res 16(5):1561-1571 (2010).

[0403] In one embodiment, an antigen-binding domain against polysialic acid is an antigen binding portion, e.g., CDRs, of an antibody described in, e.g., Nagae et al., J Biol Chem 288(47):33784-33796 (2013).

[0404] In one embodiment, an antigen-binding domain against PLAC1 is an antigen binding portion, e.g., CDRs, of an antibody described in, e.g., Ghods et al., Biotechnol Appl Biochem 2013 doi: 10.1002/bab.1177.

[0405] In one embodiment, an antigen-binding domain against GloboH is an antigen binding portion of the antibody VK9; or an antibody described in, e.g., Kudryashov V et al, Glycoconj J.15(3):243-9 (1998), Lou et al., Proc Natl Acad Sci USA 111(7):2482-2487 (2014); MBrl: Bremer E-G et al. J Biol Chem 259:14773-14777 (1984).

[0406] In one embodiment, an antigen-binding domain against NY-BR-1 is an antigen binding portion, e.g., CDRs of an antibody described in, e.g., Jager et al., Appl Immunohistochem Mol Morphol 15(1):77-83 (2007).

[0407] In one embodiment, an antigen-binding domain against WT-1 is an antigen binding portion, e.g., CDRs, of an antibody described in, e.g., Dao et al., Sci Transl Med 5(176):176ra33 (2013); or WO2012/135854.

[0408] In one embodiment, an antigen-binding domain against MAGE-A1 is an antigen binding portion, e.g., CDRs, of an antibody described in, e.g., Willemsen et al., J Immunol 174(12):7853-7858 (2005) (TCR-like scFv).

[0409] In one embodiment, an antigen-binding domain against sperm protein 17 is an antigen binding portion, e.g., CDRs, of an antibody described in, e.g., Song et al., Target Oncol 2013 Aug. 14 (PMID: 23943313); Song et al., Med Oncol 29(4):2923-2931 (2012).

[0410] In one embodiment, an antigen-binding domain against Tie 2 is an antigen-binding portion, e.g., CDRs, of the antibody AB33 (Cell Signaling Technology).

[0411] In one embodiment, an antigen binding domain against MAD-CT-2 is an antigen binding portion, e.g., CDRs, of an antibody described in, e.g., PMID: 2450952; U.S. Pat. No. 7,635,753.

[0412] In one embodiment, an antigen-binding domain against Fos-related antigen 1 is an antigen-binding portion, e.g., CDRs, of the antibody 12F9 (Novus Biologicals).

[0413] In one embodiment, an antigen-binding domain against MelanA/MART1 is an antigen-binding portion, e.g., CDRs, of an antibody described in, EP2514766 A2; or U.S. Pat. No. 7,749,719.

[0414] In one embodiment, an antigen binding domain against sarcoma translocation breakpoints is an antigen binding portion, e.g., CDRs, of an antibody described in, e.g., Luo et al, EMBO Mol. Med. 4(6):453-461 (2012).

[0415] In one embodiment, an antigen binding domain against TRP-2 is an antigen binding portion, e.g., CDRs, of an antibody described in, e.g., Wang et al, J Exp Med. 184(6):2207-16 (1996).

[0416] In one embodiment, an antigen binding domain against CYPIB1 is an antigen binding portion, e.g., CDRs, of an antibody described in, e.g., Maecker et al, Blood 102 (9): 3287-3294 (2003).

[0417] In one embodiment, an antigen-binding domain against RAGE-1 is an antigen-binding portion, e.g., CDRs, of the antibody MAB5328 (EMD Millipore).

[0418] In one embodiment, an antigen-binding domain against human telomerase reverse transcriptase is an antigen-binding portion, e.g., CDRs, of the antibody cat no: LS-B95-100 (Lifespan Biosciences)

[0419] In one embodiment, an antigen-binding domain against intestinal carboxyl esterase is an antigen-binding portion, e.g., CDRs, of the antibody 4F12: cat no: LS-B6190-50 (Lifespan Biosciences).

[0420] In one embodiment, an antigen-binding domain against mut hsp70-2 is an antigen-binding portion, e.g., CDRs, of the antibody Lifespan Biosciences: monoclonal: cat no: LS-C133261-100 (Lifespan Biosciences).

[0421] In one embodiment, an antigen-binding domain against CD79a is an antigen-binding portion, e.g., CDRs, of the antibody Anti-CD79a antibody [HM47/A9] (ab3121), available from Abcam; antibody CD79A Antibody #3351 available from Cell Signalling Technology; or antibody HPA017748-Anti-CD79A antibody produced in rabbit, available from Sigma Aldrich.

[0422] In one embodiment, an antigen binding domain against CD79b is an antigen binding portion, e.g., CDRs, of the antibody polatuzumab vedotin, anti-CD79b described in Doman et al., “Therapeutic potential of an anti-CD79b antibody-drug conjugate, anti-CD79b-vc-MMAE, for the treatment of non-Hodgkin lymphoma” Blood. 2009 Sep. 24; 114(13):2721-9. doi: 10.1182/blood-2009-02-205500. Epub 2009 Jul. 24, or the bispecific antibody Anti-CD79b/CD3 described in “4507 Pre-Clinical Characterization of T Cell-Dependent Bispecific Antibody Anti-CD79b/CD3 As a Potential Therapy for B Cell Malignancies” Abstracts of 56^{th} ASH Annual Meeting and Exposition, San Francisco, CA Dec. 6-9 2014.

[0423] In one embodiment, an antigen-binding domain against CD72 is an antigen-binding portion, e.g., CDRs, of the antibody J3-109 described in Myers, and Uckun, “An anti-CD72 μmmunotoxin against therapy-refractory B-lineage acute lymphoblastic leukemia.” Leuk Lymphoma. 1995 June; 18(1-2):119-22, or anti-CD72 (10D6.8.1, mIgG1) described in Polson et al., “Antibody-Drug Conjugates for the Treatment of Non-Hodgkin's Lymphoma: Target and Linker-Drug Selection” Cancer Res Mar. 15, 2009 69; 2358.

[0424] In one embodiment, an antigen-binding domain against LAIR1 is an antigen-binding portion, e.g., CDRs, of the antibody ANT-301 LAIR1 antibody, available from ProSpec; or anti-human CD305 (LAIR1) Antibody, available from BioLegend.

[0425] In one embodiment, an antigen binding domain against FCAR is an antigen binding portion, e.g., CDRs, of the antibody CD89/FCARAntibody (Catalog #10414-H08H), available from Sino Biological Inc.

[0426] In one embodiment, an antigen binding domain against LILRA2 is an antigen binding portion, e.g., CDRs, of the antibody LILRA2 monoclonal antibody (M17), clone 3C7, available from Abnova, or Mouse Anti-LILRA2 antibody, Monoclonal (2D7), available from Lifespan Biosciences.

[0427] In one embodiment, an antigen binding domain against CD300LF is an antigen binding portion, e.g., CDRs, of the antibody Mouse Anti-CMRF35-like molecule 1 antibody, Monoclonal[UP-D2], available from BioLegend, or Rat Anti-CMRF35-like molecule 1 antibody, Monoclonal[234903], available from R&D Systems.

[0428] In one embodiment, an antigen binding domain against CLEC12A is an antigen binding portion, e.g., CDRs, of the antibody Bispecific T cell Engager (BiTE) scFv-antibody and ADC described in Noordhuis et al., “Targeting of CLEC12A In Acute Myeloid Leukemia by Antibody-Drug-Conjugates and Bispecific CLL-1×CD3 BiTE Antibody” 53^{rd} ASH Annual Meeting and Exposition, Dec. 10-13, 2011, and MCLA-117 (Merus).

[0429] In one embodiment, an antigen binding domain against BST2 (also called CD317) is an antigen binding portion, e.g., CDRs, of the antibody Mouse Anti-CD317 antibody, Monoclonal[3H4], available from Antibodies-Online or Mouse Anti-CD317 antibody, Monoclonal[696739], available from R&D Systems.

[0430] In one embodiment, an antigen binding domain against EMR2 (also called CD312) is an antigen binding portion, e.g., CDRs, of the antibody Mouse Anti-CD312 antibody, Monoclonal[LS-B8033] available from Lifespan Biosciences, or Mouse Anti-CD312 antibody, Monoclonal [494025] available from R&D Systems.

[0431] In one embodiment, an antigen-binding domain against LY75 is an antigen-binding portion, e.g., CDRs, of the antibody Mouse Anti-Lymphocyte antigen 75 antibody, Monoclonal[HD30] available from EMD Millipore or Mouse Anti-Lymphocyte antigen 75 antibody, Monoclonal[A15797] available from Life Technologies.

[0432] In one embodiment, an antigen-binding domain against GPC3 is an antigen-binding portion, e.g., CDRs, of the antibody hGC33 described in Nakano K, Ishiguro T, Konishi H, et al. Generation of a humanized anti-glypican 3 antibody by CDR grafting and stability optimization. Anticancer Drugs. 2010 November; 21(10):907-916, or MDX-1414, HN3, or YP7, all three of which are described in Feng et al., “Glypican-3 antibodies: a new therapeutic target for liver cancer.” FEBS Lett. 2014 Jan. 21; 588(2):377-82.

[0433] In one embodiment, an antigen-binding domain against FCRL5 is an antigen-binding portion, e.g., CDRs, of the anti-FcRL5 antibody described in Elkins et al., “FcRL5 as a target of antibody-drug conjugates for the treatment of multiple myeloma” Mol Cancer Ther. 2012 October; 11(10):2222-32.

[0434] In one embodiment, an antigen-binding domain against IGLL1 is an antigen-binding portion, e.g., CDRs, of the antibody Mouse Anti-Immunoglobulin lambda-like polypeptide 1 antibody, Monoclonal[AT1G4] available from Lifespan Biosciences, Mouse Anti-Immunoglobulin lambda-like polypeptide 1 antibody, Monoclonal[HSL11] available from BioLegend.

[0435] In one embodiment, the antigen binding domain comprises one, two three (e.g., all three) heavy chain CDRs, HC CDR1, HC CDR2 and HC CDR3, from an antibody listed above, and/or one, two, three (e.g., all three) light chain CDRs, LC CDR1, LC CDR2 and LC CDR3, from an antibody listed above. In one embodiment, the antigen-binding domain comprises a heavy chain variable region and/or a variable light chain region of an antibody listed above.

[0436] In another aspect, the antigen-binding domain comprises a humanized antibody or an antibody fragment. In some aspects, a non-human antibody is humanized, where specific sequences or regions of the antibody are modified to increase similarity to an antibody naturally produced in a human or fragment thereof. In one aspect, the antigen-binding domain is humanized.

[0437] A humanized antibody can be produced using a variety of techniques known in the art, including but not limited to, CDR-grafting (see, e.g., European Patent No. EP 239,400; International Publication No. WO 91/09967; and U.S. Pat. Nos. 5,225,539, 5,530,101, and 5,585,089, each of which is incorporated herein in its entirety by reference), veneering or resurfacing (see, e.g., European Patent Nos. EP 592,106 and EP 519,596; Padlan, 1991, Molecular Immunology, 28(4/5):489-498; Studnicka et al., 1994, Protein Engineering, 7(6):805-814; and Roguska et al., 1994, PNAS, 91:969-973, each of which is incorporated herein by its entirety by reference), chain shuffling (see, e.g., U.S. Pat. No. 5,565,332, which is incorporated herein in its entirety by reference), and techniques disclosed in, e.g., U.S. Patent Application Publication No. US2005/0042664, U.S. Patent Application Publication No. US2005/0048617, U.S. Pat. Nos. 6,407,213, 5,766,886, International Publication No. WO 9317105, Tan et al., J. Immunol., 169:1119-25 (2002), Caldas et al., Protein Eng., 13(5):353-60 (2000), Morea et al., Methods, 20(3):267-79 (2000), Baca et al., J. Biol. Chem., 272(16):10678-84 (1997), Roguska et al., Protein Eng., 9(10):895-904 (1996), Couto et al., Cancer Res., 55 (23 Supp):5973s-5977s (1995), Couto et al., Cancer Res., 55(8):1717-22 (1995), Sandhu J S, Gene, 150(2):409-10 (1994), and Pedersen et al., J. Mol. Biol., 235(3):959-73 (1994), each of which is incorporated herein in its entirety by reference. Often, framework residues in the framework regions will be substituted with the corresponding residue from the CDR donor antibody to alter, for example improve, antigen binding. These framework substitutions are identified by methods well known in the art, e.g., by modeling of the interactions of the CDR and framework residues to identify framework residues important for antigen binding and sequence comparison to identify unusual framework residues at particular positions. (See, e.g., Queen et al., U.S. Pat. No. 5,585,089; and Riechmann et al., 1988, Nature, 332:323, which are incorporated herein by reference in their entireties.)

[0438] A humanized antibody or antibody fragment has one or more amino acid residues remaining in it from a source which is nonhuman. These nonhuman amino acid residues are often referred to as “import” residues, which are typically taken from an “import” variable domain. As provided herein, humanized antibodies or antibody fragments comprise one or more CDRs from nonhuman immunoglobulin molecules and framework regions wherein the amino acid residues comprising the framework are derived completely or mostly from human germline. Multiple techniques for humanization of antibodies or antibody fragments are well-known in the art and can essentially be performed following the method of Winter and co-workers (Jones et al., Nature, 321:522-525 (1986); Riechmann et al., Nature, 332:323-327 (1988); Verhoeyen et al., Science, 239:1534-1536 (1988)), by substituting rodent CDRs or CDR sequences for the corresponding sequences of a human antibody, i.e., CDR-grafting (EP 239,400; PCT Publication No. WO 91/09967; and U.S. Pat. Nos. 4,816,567; 6,331,415; 5,225,539; 5,530,101; 5,585,089; 6,548,640, the contents of which are incorporated herein by reference herein in their entirety). In such humanized antibodies and antibody fragments, substantially less than an intact human variable domain has been substituted by the corresponding sequence from a nonhuman species. Humanized antibodies are often human antibodies in which some CDR residues and possibly some framework (FR) residues are substituted by residues from analogous sites in rodent antibodies. Humanization of antibodies and antibody fragments can also be achieved by veneering or resurfacing (EP 592,106; EP 519,596; Padlan, 1991, Molecular Immunology, 28(4/5):489-498; Studnicka et al., Protein Engineering, 7(6):805-814 (1994); and Roguska et al., PNAS, 91:969-973 (1994)) or chain shuffling (U.S. Pat. No. 5,565,332), the contents of which are incorporated herein by reference herein in their entirety.

[0439] The choice of human variable domains, both light and heavy, to be used in making the humanized antibodies is to reduce antigenicity. According to the so-called “best-fit” method, the sequence of the variable domain of a rodent antibody is screened against the entire library of known human variable-domain sequences. The human sequence which is closest to that of the rodent is then accepted as the human framework (FR) for the humanized antibody (Sims et al., J. Immunol., 151:2296 (1993); Chothia et al., J. Mol. Biol., 196:901 (1987), the contents of which are incorporated herein by reference herein in their entirety). Another method uses a particular framework derived from the consensus sequence of all human antibodies of a particular subgroup of light or heavy chains. The same framework may be used for several different humanized antibodies (see, e.g., Nicholson et al. Mol. Immun. 34 (16-17): 1157-1165 (1997); Carter et al., Proc. Natl. Acad. Sci. USA, 89:4285 (1992); Presta et al., J. Immunol., 151:2623 (1993), the contents of which are incorporated herein by reference herein in their entirety). In some embodiments, the framework region, e.g., all four framework regions, of the heavy chain variable region are derived from a VH4_4-59 germline sequence. In one embodiment, the framework region can comprise, one, two, three, four or five modifications, e.g., substitutions, e.g., from the amino acid at the corresponding murine sequence. In one embodiment, the framework region, e.g., all four framework regions of the light chain variable region are derived from a VK3_1.25 germline sequence. In one embodiment, the framework region can comprise, one, two, three, four or five modifications, e.g., substitutions, e.g., from the amino acid at the corresponding murine sequence.

[0440] In some aspects, the portion of a CAR composition of the disclosure that comprises an antibody fragment is humanized with retention of high affinity for the target antigen and other favorable biological properties. According to one aspect of the disclosure, humanized antibodies and antibody fragments are prepared by a process of analysis of the parental sequences and various conceptual humanized products using three-dimensional models of the parental and humanized sequences. Three-dimensional immunoglobulin models are commonly available and are familiar to those skilled in the art. Computer programs are available which illustrate and display probable three-dimensional conformational structures of selected candidate immunoglobulin sequences. Inspection of these displays permits analysis of the likely role of the residues in the functioning of the candidate immunoglobulin sequence, e.g., the analysis of residues that influence the ability of the candidate immunoglobulin to bind the target antigen. In this way, FR residues can be selected and combined from the recipient and import sequences so that the desired antibody or antibody fragment characteristic, such as increased affinity for the target antigen, is achieved. In general, the CDR residues are directly and most substantially involved in influencing antigen binding.

[0441] A humanized antibody or antibody fragment may retain a similar antigenic specificity as the original antibody, e.g., in the present disclosure, the ability to bind human a cancer associated antigen as described herein. In some embodiments, a humanized antibody or antibody fragment may have improved affinity and/or specificity of binding to human a cancer associated antigen as described herein.

[0442] In one aspect, the antigen-binding domain of the disclosure is characterized by particular functional features or properties of an antibody or antibody fragment. For example, in one aspect, the portion of a CAR composition of the disclosure that comprises an antigen-binding domain specifically binds a tumor antigen as described herein.

[0443] In one aspect, the anti-cancer associated antigen as described herein binding domain is a fragment, e.g., a single chain variable fragment (scFv). In one aspect, the anti-cancer associated antigen as described herein binding domain is a Fv, a Fab, a (Fab′)₂, or a bi-functional (e.g. bi-specific) hybrid antibody (e.g., Lanzavecchia et al., Eur. J. Immunol. 17, 105 (1987)). In one aspect, the antibodies and fragments thereof of the disclosure binds a cancer associated antigen as described herein protein with wild-type or enhanced affinity.

[0444] In some instances, scFvs can be prepared according to method known in the art (see, for example, Bird et al., (1988) Science 242:423-426 and Huston et al., (1988) Proc. Natl. Acad. Sci. USA 85:5879-5883). ScFv molecules can be produced by linking VH and VL regions together using flexible polypeptide linkers. The scFv molecules comprise a linker (e.g., a Ser-Gly linker) with an optimized length and/or amino acid composition. The linker length can greatly affect how the variable regions of a scFv fold and interact. In fact, if a short polypeptide linker is employed (e.g., between 5-10 amino acids) intrachain folding is prevented. Interchain folding is also required to bring the two variable regions together to form a functional epitope binding site. For examples of linker orientation and size see, e.g., Hollinger et al. 1993 Proc Natl Acad. Sci. U.S.A. 90:6444-6448, U.S. Patent Application Publication Nos. 2005/0100543, 2005/0175606, 2007/0014794, and PCT publication Nos. WO2006/020258 and WO2007/024715, is incorporated herein by reference.

[0445] An scFv can comprise a linker of at least 1, 2, 3, 4, 5, 6, 7, 8, 9, 10, 11, 12, 13, 14, 15, 16, 17, 18, 19, 20, 25, 30, 35, 40, 45, 50, or more amino acid residues between its VL and VH regions. The linker sequence may comprise any naturally occurring amino acid. In some embodiments, the linker sequence comprises amino acids glycine and serine. In another embodiment, the linker sequence comprises sets of glycine and serine repeats such as (Gly₄Ser)n, where n is a positive integer equal to or greater than 1 (SEQ ID NO: 3000). In one embodiment, the linker can be (Gly₄Ser)₄ (SEQ ID NO: 3001) or (Gly₄Ser)₃(SEQ ID NO: 3002). Variation in the linker length may retain or enhance activity, giving rise to superior efficacy in activity studies.

[0446] In another aspect, the antigen-binding domain is a T cell receptor (“TCR”), or a fragment thereof, for example, a single chain TCR (scTCR). Methods to make such TCRs are known in the art. See, e.g., Willemsen RA et al, Gene Therapy 7: 1369-1377 (2000); Zhang T et al, Cancer Gene Ther 11: 487-496 (2004); Aggen et al, Gene Ther. 19(4):365-74 (2012) (references are incorporated herein by its entirety). For example, scTCR can be engineered that contains the Va and VD genes from a T cell clone linked by a linker (e.g., a flexible peptide). This approach is very useful to cancer associated target that itself is intracellar, however, a fragment of such antigen (peptide) is presented on the surface of the cancer cells by MHC.

[0447] In one embodiment, an antigen-binding domain against EGFRvIII is an antigen-binding portion, e.g., CDRs, of a CAR molecule, antibody or antigen-binding fragment thereof described in, e.g., PCT publication WO2014/130657 or US2014/0322275A1. In one embodiment, the CAR molecule comprises an EGFRvIII CAR, or an antigen binding domain according to Table 2 or SEQ ID NO: 11 of WO 2014/130657, incorporated herein by reference, or a sequence substantially identical thereto (e.g., at least 85%, 90%, 95% or more identical thereto). The amino acid and nucleotide sequences encoding the EGFRvIII CAR molecules and antigen binding domains (e.g., including one, two, three VH CDRs; and one, two, three VL CDRs according to Kabat or Chothia), are specified in WO 2014/130657.

[0448] In one embodiment, an antigen-binding domain against mesothelin is an antigen-binding portion, e.g., CDRs, of an antibody, antigen-binding fragment or CAR molecule described in, e.g., PCT publication WO2015/090230. In one embodiment, an antigen-binding domain against mesothelin is an antigen-binding portion, e.g., CDRs, of an antibody, antigen-binding fragment, or CAR molecule described in, e.g., PCT publication WO1997/025068, WO1999/028471, WO2005/014652, WO2006/099141, WO2009/045957, WO2009/068204, WO2013/142034, WO2013/040557, or WO2013/063419.

[0449] In an embodiment, the CAR molecule comprises a mesothelin CAR described herein, e.g., a mesothelin CAR described in WO 2015/090230, incorporated herein by reference. In some embodiments, the mesothelin CAR comprises an amino acid, or has a nucleotide sequence shown in WO 2015/090230 incorporated herein by reference, or a sequence substantially identical to any of the aforesaid sequences (e.g., at least 85%, 90%, 95% or more identical to any of the aforesaid mesothelin CAR sequences). In one embodiment, the CAR molecule comprises a mesothelin CAR, or an antigen binding domain according to Tables 2-3 of WO 2015/090230, incorporated herein by reference, or a sequence substantially identical thereto (e.g., at least 85%, 90%, 95% or more identical thereto). The amino acid and nucleotide sequences encoding the mesothelin CAR molecules and antigen binding domains (e.g., including one, two, three VH CDRs; and one, two, three VL CDRs according to Kabat or Chothia), are specified in WO 2015/090230.

### CAR Transmembrane Domain

[0450] With respect to the transmembrane domain, in various embodiments, a CAR molecule can be designed to comprise a transmembrane domain that is attached to the extracellular domain of the CAR molecule. A transmembrane domain can include one or more additional amino acids adjacent to the transmembrane region, e.g., one or more amino acid associated with the extracellular region of the protein from which the transmembrane was derived (e.g., 1, 2, 3, 4, 5, 6, 7, 8, 9, 10 up to 15 amino acids of the extracellular region) and/or one or more additional amino acids associated with the intracellular region of the protein from which the transmembrane protein is derived (e.g., 1, 2, 3, 4, 5, 6, 7, 8, 9, 10 up to 15 amino acids of the intracellular region). In some embodiments, the transmembrane domain is one that is associated with one of the other domains of the CAR molecule. In some instances, the transmembrane domain can be selected or modified by amino acid substitution to avoid binding of such domains to the transmembrane domains of the same or different surface membrane proteins, e.g., to minimize interactions with other members of the receptor complex. In some embodiments, the transmembrane domain is capable of homodimerization with another CAR molecule on the cell surface of a CAR-expressing cell. In some embodiments, the amino acid sequence of the transmembrane domain may be modified or substituted so as to minimize interactions with the binding domains of the native binding partner present in the same CART.

[0451] The transmembrane domain may be derived either from a natural or from a recombinant source. Where the source is natural, the domain may be derived from any membrane-bound or transmembrane protein. In some embodiments, the transmembrane domain is capable of signaling to the intracellular domain(s) whenever the CAR molecule has bound to a target. A transmembrane domain of particular use in this disclosure may include at least the transmembrane region(s) of e.g., the alpha, beta or zeta chain of the T-cell receptor, CD28, CD27, CD3 epsilon, CD45, CD4, CD5, CD8, CD9, CD16, CD22, CD33, CD37, CD64, CD80, CD86, CD134, CD137, CD154. In some embodiments, a transmembrane domain may include at least the transmembrane region(s) of, e.g., KIR2DS2, OX40, CD2, CD27, LFA-1 (CD11a, CD18), ICOS (CD278), 4-1BB (CD137), GITR, CD40, BAFFR, HVEM (LIGHTR), SLAMF7, NKp80 (KLRF1), NKp44, NKp30, NKp46, CD160, CD19, IL2R beta, IL2R gamma, IL7R α, ITGA1, VLA1, CD49a, ITGA4, IA4, CD49D, ITGA6, VLA-6, CD49f, ITGAD, CD11d, ITGAE, CD103, ITGAL, CD11a, LFA-1, ITGAM, CD11b, ITGAX, CD11c, ITGB1, CD29, ITGB2, CD18, LFA-1, ITGB7, TNFR2, DNAM1 (CD226), SLAMF4 (CD244, 2B4), CD84, CD96 (Tactile), CEACAM1, CRTAM, Ly9 (CD229), CD160 (BY55), PSGL1, CD100 (SEMA4D), SLAMF6 (NTB-A, Ly108), SLAM (SLAMF1, CD150, IPO-3), BLAME (SLAMF8), SELPLG (CD162), LTBR, PAG/Cbp, NKG2D, NKG2C.

[0452] In some instances, the transmembrane domain can be attached to the extracellular region of the CAR molecule, e.g., the antigen-binding domain of the CAR molecule, via a hinge, e.g., a hinge from a human protein. For example, in some embodiments, the hinge can be a human Ig (immunoglobulin) hinge, e.g., an IgG4 hinge, or a CD8a hinge. In some embodiments, the hinge or spacer comprises (e.g., consists of) the amino acid sequence of SEQ ID NO: 1018. In some embodiments, the transmembrane domain comprises (e.g., consists of) a transmembrane domain of SEQ ID NO: 1026.

[0453] In some embodiments, the hinge or spacer comprises an IgG4 hinge. For example, in some embodiments, the hinge or spacer comprises a hinge of the amino acid sequence of SEQ ID NO: 1020. In some embodiments, the hinge or spacer comprises a hinge encoded by a nucleotide sequence of SEQ ID NO: 1021.

[0454] In some embodiments, the hinge or spacer comprises an IgD hinge. For example, in some embodiments, the hinge or spacer comprises a hinge of the amino acid sequence of SEQ ID NO: 1022. In some embodiments, the hinge or spacer comprises a hinge encoded by a nucleotide sequence of SEQ ID NO: 1023.

[0455] In some embodiments, the transmembrane domain may be recombinant, in which case it will comprise predominantly hydrophobic residues such as leucine and valine. In some embodiments, a triplet of phenylalanine, tryptophan and valine can be found at each end of a recombinant transmembrane domain.

[0456] Optionally, a short oligo- or polypeptide linker, between 2 and 10 amino acids in length may form the linkage between the transmembrane domain and the cytoplasmic region of the CAR molecule. A glycine-serine doublet provides a particularly suitable linker. For example, in some embodiments, the linker comprises the amino acid sequence of SEQ ID NO: 1024. In some embodiments, the linker is encoded by a nucleotide sequence of SEQ ID NO: 1025.

[0457] In some embodiments, the hinge or spacer comprises a KIR2DS2 hinge.

### Cytoplasmic Domain

[0458] The cytoplasmic domain or region of the CAR molecule includes an intracellular signaling domain. An intracellular signaling domain is generally responsible for activation of at least one of the normal effector functions of the immune cell in which the CAR molecule has been introduced.

[0459] Examples of intracellular signaling domains for use in a CAR molecule described herein include the cytoplasmic sequences of the T cell receptor (TCR) and co-receptors that act in concert to initiate signal transduction following antigen receptor engagement, as well as any derivative or variant of these sequences and any recombinant sequence that has the same functional capability.

[0460] It is known that signals generated through the TCR alone are insufficient for full activation of the T cell and that a secondary and/or costimulatory signal is also required. Thus, T cell activation can be said to be mediated by two distinct classes of cytoplasmic signaling sequences: those that initiate antigen-dependent primary activation through the TCR (primary intracellular signaling domains) and those that act in an antigen-independent manner to provide a secondary or costimulatory signal (secondary cytoplasmic domain, e.g., a costimulatory domain).

[0461] A primary signaling domain regulates primary activation of the TCR complex either in a stimulatory way, or in an inhibitory way. Primary intracellular signaling domains that act in a stimulatory manner may contain signaling motifs which are known as immunoreceptor tyrosine-based activation motifs or ITAMs.

[0462] Examples of ITAM containing primary intracellular signaling domains that are of particular use in the disclosure include those of TCR zeta, FcR gamma, FcR beta, CD3 gamma, CD3 delta, CD3 epsilon, CD5, CD22, CD79a, CD79b, CD278 (also known as “ICOS”), FεRI, DAP10, DAP12, and CD66d. In some embodiments, a CAR molecule of the disclosure comprises an intracellular signaling domain, e.g., a primary signaling domain of CD3-zeta, e.g., a CD3-zeta sequence described herein.

[0463] In some embodiments, a primary signaling domain comprises a modified ITAM domain, e.g., a mutated ITAM domain which has altered (e.g., increased or decreased) activity as compared to the native ITAM domain. In some embodiments, a primary signaling domain comprises a modified ITAM-containing primary intracellular signaling domain, e.g., an optimized and/or truncated ITAM-containing primary intracellular signaling domain. In some embodiments, a primary signaling domain comprises one, two, three, four or more ITAM motifs.

### Costimulatory Signaling Domain

[0464] The intracellular signalling domain of the CAR molecule can comprise the CD3-zeta signaling domain by itself or it can be combined with any other desired intracellular signaling domain(s) useful in the context of a CAR molecule of the disclosure. For example, the intracellular signaling domain of the CAR can comprise a CD3 zeta chain portion and a costimulatory signaling domain. The costimulatory signaling domain refers to a portion of the CAR molecule comprising the intracellular domain of a costimulatory molecule. In some embodiments, the intracellular domain is designed to comprise the signaling domain of CD3-zeta and the signaling domain of CD28. In some embodiments, the intracellular domain is designed to comprise the signaling domain of CD3-zeta and the signaling domain of ICOS.

[0465] A costimulatory molecule can be a cell surface molecule other than an antigen receptor or its ligands that is required for an efficient response of lymphocytes to an antigen. Examples of such molecules include CD27, CD28, 4-1BB (CD137), OX40, CD30, CD40, PD-1, ICOS, lymphocyte function-associated antigen-1 (LFA-1), CD2, CD7, LIGHT, NKG2C, B7-H3, and a ligand that specifically binds with CD83, and the like. For example, CD27 costimulation has been demonstrated to enhance expansion, effector function, and survival of human CART cells in vitro and augments human T cell persistence and antitumor activity in vivo (Song et al. Blood. 2012; 119(3):696-706). Further examples of such costimulatory molecules include CDS, ICAM-1, GITR, BAFFR, HVEM (LIGHTR), SLAMF7, NKp80 (KLRF1), NKp30, NKp44, NKp46, CD160, CD19, CD4, CD8alpha, CD8beta, IL2R beta, IL2R gamma, IL7R alpha, ITGA4, VLA1, CD49a, ITGA4, IA4, CD49D, ITGA6, VLA-6, CD49f, ITGAD, CD11d, ITGAE, CD103, ITGAL, CD11a, LFA-1, ITGAM, CD11b, ITGAX, CD11c, ITGB1, CD29, ITGB2, CD18, LFA-1, ITGB7, TNFR2, TRANCE/RANKL, DNAM1 (CD226), SLAMF4 (CD244, 2B4), CD84, CD96 (Tactile), CEACAM1, CRTAM, Ly9 (CD229), CD160 (BY55), PSGL1, CD100 (SEMA4D), CD69, SLAMF6 (NTB-A, Ly108), SLAM (SLAMF1, CD150, IPO-3), BLAME (SLAMF8), SELPLG (CD162), LTBR, LAT, GADS, SLP-76, NKG2D, NKG2C and PAG/Cbp.

[0466] The intracellular signaling sequences within the cytoplasmic portion of the CAR molecule may be linked to each other in a random or specified order. Optionally, a short oligo- or polypeptide linker, for example, between 2 and 10 amino acids (e.g., 2, 3, 4, 5, 6, 7, 8, 9, or 10 amino acids) in length may form the linkage between intracellular signaling sequences. In some embodiments, a glycine-senne doublet can be used as a suitable linker. In some embodiments, a single amino acid, e.g., an alanine, a glycine, can be used as a suitable linker.

[0467] In some embodiments, the intracellular signaling domain is designed to comprise two or more, e.g., 2, 3, 4, 5, or more, costimulatory signaling domains. In some embodiments, the two or more, e.g., 2, 3, 4, 5, or more, costimulatory signaling domains, are separated by a linker molecule, e.g., a linker molecule described herein. In some embodiments, the intracellular signaling domain comprises two costimulatory signaling domains. In some embodiments, the linker molecule is a glycine residue. In some embodiments, the linker is an alanine residue.

[0468] In some embodiments, the intracellular signaling domain is designed to comprise the signaling domain of CD3-zeta and the signaling domain of CD28. In some embodiments, the intracellular signaling domain is designed to comprise the signaling domain of CD3-zeta and the signaling domain of 4-1BB. In some embodiments, the signaling domain of 4-1BB is a signaling domain of SEQ ID NO: 1029. In some embodiments, the signaling domain of CD3-zeta is a signaling domain of SEQ ID NO: 1034.

[0469] In some embodiments, the intracellular signaling domain is designed to comprise the signaling domain of CD3-zeta and the signaling domain of CD27. In some embodiments, the signaling domain of CD27 comprises an amino acid sequence of SEQ ID NO: 1032. In some embodiments, the signalling domain of CD27 is encoded by a nucleic acid sequence of SEQ ID NO: 1033.

[0470] In some embodiments, the CAR cell described herein can further comprise a second CAR molecule, e.g., a second CAR molecule that includes a different antigen binding domain, e.g., to the same target or a different target (e.g., a target other than a cancer associated antigen described herein or a different cancer associated antigen described herein, e.g., CD19, CD33, CLL-1, CD34, FLT3, or folate receptor beta). In some embodiments, the second CAR molecule includes an antigen binding domain to a target expressed the same cancer cell type as the cancer associated antigen. In some embodiments, the CAR-expressing cell comprises a first CAR molecule that targets a first antigen and includes an intracellular signaling domain having a costimulatory signaling domain but not a primary signaling domain, and a second CAR molecule that targets a second, different, antigen and includes an intracellular signaling domain having a primary signaling domain but not a costimulatory signaling domain. While not wishing to be bound by theory, placement of a costimulatory signaling domain, e.g., 4-1BB, CD28, ICOS, CD27 or OX-40, onto the first CAR molecule, and the primary signaling domain, e.g., CD3 zeta, on the second CAR molecule can limit the CAR activity to cells where both targets are expressed. In some embodiments, the CAR expressing cell comprises a first cancer associated antigen CAR that includes an antigen binding domain that binds a target antigen described herein, a transmembrane domain and a costimulatory domain and a second CAR molecule that targets a different target antigen (e.g., an antigen expressed on that same cancer cell type as the first target antigen) and includes an antigen binding domain, a transmembrane domain and a primary signaling domain. In some embodiments, the CAR expressing cell comprises a first CAR molecule that includes an antigen binding domain that binds a target antigen described herein, a transmembrane domain and a primary signaling domain and a second CAR molecule that targets an antigen other than the first target antigen (e.g., an antigen expressed on the same cancer cell type as the first target antigen) and includes an antigen binding domain to the antigen, a transmembrane domain and a costimulatory signaling domain.

[0471] In some embodiments, the disclosure features a population of CAR cell, e.g., CART cells. In some embodiments, the population of CAR cells comprises a mixture of cells expressing different CAR molecules. For example, in some embodiments, the population of CART cells can include a first cell expressing a CAR molecule having an antigen binding domain to a cancer associated antigen described herein, and a second cell expressing a CAR molecule having a different antigen binding domain, e.g., an antigen binding domain to a different a cancer associated antigen described herein, e.g., an antigen binding domain to a cancer associated antigen described herein that differs from the cancer associate antigen bound by the antigen binding domain of the CAR molecule expressed by the first cell. As another example, the population of CAR cells can include a first cell expressing a CAR molecule that includes an antigen-binding domain to a cancer associated antigen described herein, and a second cell expressing a CAR molecule that includes an antigen-binding domain to a target other than a cancer associate antigen as described herein. In some embodiments, the population of CAR cells includes, e.g., a first cell expressing a CAR molecule that includes a primary intracellular signaling domain, and a second cell expressing a CAR molecule that includes a secondary signaling domain.

[0472] In some embodiments, the disclosure features a population of cells wherein at least one cell in the population expresses a CAR molecule having an antigen-binding domain to a cancer associated antigen described herein, and a second cell expressing another agent, e.g., an agent which enhances the activity of a CAR-expressing cell. For example, in some embodiments, the agent can be an agent which inhibits an inhibitory molecule. Inhibitory molecules, e.g., PD-1, can, in some embodiments, decrease the ability of a CAR-expressing cell to mount an immune effector response. Examples of inhibitory molecules include PD-1, PD-L1, CTLA4, TIM3, CEACAM (CEACAM-1, CEACAM-3, and/or CEACAM-5), LAG3, VISTA, BTLA, TIGIT, LAIR1, CD160, 2B4, CD80, CD86, B7-H3 (CD276), B7-H4 (VTCN1), HVEM (TNFRSFi4 or CD270), KIR, A2aR, MHC class I, MHC class II, GAL9, adenosine, and TGF (e.g., TGFbeta). In some embodiments, the agent which inhibits an inhibitory molecule comprises a first polypeptide, e.g., an inhibitory molecule, associated with a second polypeptide that provides a positive signal to the cell, e.g., an intracellular signaling domain described herein. In some embodiments, the agent comprises a first polypeptide, e.g., of an inhibitory molecule such as PD-1, PD-L1, CTLA4, TIM3, CEACAM (CEACAM-1, CEACAM-3, and/or CEACAM-5), LAG3, VISTA, BTLA, TIGIT, LAIR1, CD160, 2B4 and TGF beta, or a fragment of any of these, and a second polypeptide which is an intracellular signaling domain described herein (e.g., comprising a costimulatory domain (e.g., 41BB, CD27, OX40 or CD28, e.g., as described herein) and/or a primary signaling domain (e.g., a CD3 zeta signaling domain described herein). In some embodiments, the agent comprises a first polypeptide of PD-1 or a fragment thereof, and a second polypeptide of an intracellular signaling domain described herein (e.g., a CD28 signaling domain described herein and/or a CD3 zeta signaling domain described herein).

### CD19 CAR and CD19-Binding Sequences

[0473] In some embodiments, the CAR or CAR-expressing cell described herein is a CD19 CAR-expressing cell (e.g., a cell expressing a CAR molecule that binds to human CD19).

[0474] In some embodiments, the antigen-binding domain of the CD19 CAR has the same or a similar binding specificity as the FMC63 scFv fragment described in Nicholson et al. Mol. Immun. 34 (16-17): 1157-1165 (1997). In some embodiments, the antigen-binding domain of the CD19 CAR includes the scFv fragment described in Nicholson et al. Mol. Immun. 34 (16-17): 1157-1165 (1997).

[0475] In some embodiments, the CD19 CAR includes an antigen-binding domain (e.g., a humanized antigen binding domain) according to Table 3 of WO2014/153270, incorporated herein by reference. WO2014/153270 also describes methods of assaying the binding and efficacy of various CAR constructs.

[0476] In some embodiments, the parental murine scFv sequence is the CAR19 construct provided in PCT publication WO2012/079000 (incorporated herein by reference). In some embodiments, the anti-CD19 binding domain is a scFv described in WO2012/079000.

[0477] In some embodiments, the CAR molecule comprises the fusion polypeptide sequence provided as SEQ ID NO: 12 in PCT publication WO2012/079000, which provides an scFv fragment of murine origin that specifically binds to human CD19.

[0478] In some embodiments, the CD19 CAR comprises an amino acid sequence provided as SEQ ID NO: 12 in PCT publication WO2012/079000. In some embodiments, the amino acid sequence is (MALPVTALLLPLALLLHAARP)digmtqttsslsaslgdrvtiscrasqdiskylnwyqqkpdgtvklliyhtsrlhsgvpsrfs gsgsgtdysltisnlegediatyfcqqgntlpytfgggtkleitggggsggggsggggsevklqesgpglvapsqslsvtctvsgvslpdygvsw irqpprkglewlgviwgsettyynsalksrltiikdnsksqvflkmnslqtddtaiyycakhyyyggsyamdywgqgtsvtvsstttpaprppt paptiasqplslrpeacrpaaggavhtrgldfacdiyiwaplagtcgvlllslvitlyckrgrkkllyifkqpfmrpvqttqeedgcscrfpeeeeg gcelrvkfsrsadapaykqgqnqlynelnlgrreeydvldkrrgrdpemggkprrknpqeglynelqkdkmaeayseigmkgerrrgkgh dglyqglstatkdtydalhmqalppr (SEQ ID NO: 1053), or a sequence substantially homologous thereto. The optional sequence of the signal peptide is shown in capital letters and parenthesis.

[0479] In some embodiments, the amino acid sequence is: digmtqttsslsaslgdrvtiscrasqdiskylnwyqqkpdgtvklliyhtsrlhsgvpsrfsgsgsgtdysltisnleqediatyfcqqgntlpytfg ggtkleitggggsggggsggggsevklgesgpglvapsqslsvtctvsgvslpdygvswirqpprkglewlgviwgsettyynsalksrltiik dnsksqvflkmnslqtddtaiyycakhyyyggsyamdywgqgtsvtvsstttpaprpptpaptiasqplslrpeacrpaaggavhtrgldfac diyiwaplagtcgvlllslvitlyckrgrkkllyifkqpfmrpvqttqeedgcscrfpeeeeggcelrvkfsrsadapaykqgqnqlynelnlgrr eeydvldkrrgrdpemggkprrknpgeglynelqkdkmaeayseigmkgerrrgkghdglygglstatkdtydalhmqalppr (SEQ ID NO: 1054), or a sequence substantially homologous thereto.

[0480] In some embodiments, the CAR molecule is a humanized CD19 CAR comprising the amino acid sequence of:

(SEQ ID NO: 3202)
MALPVTALLLPLALLLHAARPEIVMTQSPATLSLSPGERATLSCRASQD
ISKYLNWYQQKPGQAPRLLIYHTSRLHSGIPARFSGSGSGTDYTLTISS
LQPEDFAVYFCQQGNTLPYTFGQGTKLEIKGGGGSGGGGSGGGGSQVQL
QESGPGLVKPSETLSLTCTVSGVSLPDYGVSWIRQPPGKGLEWIGVIWG
SETTYYQSSLKSRVTISKDNSKNQVSLKLSSVTAADTAVYYCAKHYYYG
GSYAMDYWGQGTLVTVSSTTTPAPRPPTPAPTIASQPLSLRPEACRPAA
GGAVHTRGLDFACDIYIWAPLAGTCGVLLLSLVITLYCKRGRKKLLYIF
KQPFMRPVQTTQEEDGCSCRFPEEEEGGCELRVKFSRSADAPAYQQGQN
QLYNELNLGRREEYDVLDKRRGRDPEMGGKPRRKNPQEGLYNELQKDKM
AEAYSEIGMKGERRRGKGHDGLYQGLSTATKDTYDALHMQALPPR

[0481] In some embodiments, the CAR molecule is a humanized CD19 CAR comprising the amino acid sequence of:

(SEQ ID NO: 3203)
EIVMTQSPATLSLSPGERATLSCRASQDISKYLNWYQQKPGQAPRLLIY
HTSRLHSGIPARFSGSGSGTDYTLTISSLQPEDFAVYFCQQGNTLPYTF
GQGTKLEIKGGGGSGGGGSGGGGSQVQLQESGPGLVKPSETLSLTCTVS
GVSLPDYGVSWIRQPPGKGLEWIGVIWGSETTYYQSSLKSRVTISKDNS
KNQVSLKLSSVTAADTAVYYCAKHYYYGGSYAMDYWGQGTLVTVSSTTT
PAPRPPTPAPTIASQPLSLRPEACRPAAGGAVHTRGLDFACDIYIWAPL
AGTCGVLLLSLVITLYCKRGRKKLLYIFKQPFMRPVQTTQEEDGCSCRF
PEEEEGGCELRVKFSRSADAPAYQQGQNQLYNELNLGRREEYDVLDKRR
GRDPEMGGKPRRKNPQEGLYNELQKDKMAEAYSEIGMKGERRRGKGHDG
LYQGLSTATKDTYDALHMQALPPR

[0482] In some embodiments, the CD19 CAR has the USAN designation TISAGENLECLEUCEL-T. In embodiments, CTL019 is made by a gene modification of T cells is mediated by stable insertion via transduction with a self-inactivating, replication deficient Lentiviral (LV) vector containing the CTL019 transgene under the control of the EF-1 alpha promoter. CTL019 can be a mixture of transgene positive and negative T cells that are delivered to the subject on the basis of percent transgene positive T cells.

[0483] In some embodiments, the CAR T cell that specifically binds to CD19 has the INN designation Axicabtagene ciloleucel. In one embodiment, the CAR T cell that specifically binds to CD19 has the USAN designation brexucabtagene autoleucel. In some embodiments, Axicabtagene ciloleucel is also known as YESCARTA®, Axi-cel, or KTE-C19. In some embodiments, brexucabtagene autoleucel is also known as KTE-X19 or TECARTUS®.

[0484] In one embodiment, the CAR T cell that specifically binds to CD19 has the INN designation Lisocabtagene maraleucel. In some embodiments, Lisocabtagene maraleucel is also known as JCAR017.

[0485] In other embodiments, the CD19 CAR comprises an antigen-binding domain (e.g., a humanized antigen binding domain) according to Table 3 of WO2014/153270, incorporated herein by reference.

[0486] Humanization of murine CD19 antibody is desired for the clinical setting, where the mouse-specific residues may induce a human-anti-mouse antigen (HAMA) response in patients who receive CART19 treatment, i.e., treatment with T cells transduced with the CAR19 construct. The production, characterization, and efficacy of humanized CD19 CAR sequences is described in International Application WO2014/153270 which is herein incorporated by reference in its entirety, including Examples 1-5 (p. 115-159).

[0487] In some embodiments, CD19 CAR constructs are described in PCT publication WO 2012/079000, incorporated herein by reference, and the amino acid sequence of the murine CD19 CAR and scFv constructs are shown in Table 3 below, or a sequence substantially identical to any of the aforesaid sequences (e.g., at least 85%, 90%, 95% or more identical to any of the sequences described herein).

TABLE 3
Exemplary CD19 CAR Constructs

| | | |
|---|---|---|
| SEQ ID | | |
| NO | Region | Sequence |

CTL019

| | | |
|---|---|---|
| SEQ ID | CTL019 Full | MALPVTALLLPLALLLHAARPDIQMTQTTSSLSASLGDRVTISCR |
| NO: 1055 | amino acid | ASQDISKYLNWYQQKPDGTVKLLIYHTSRLHSGVPSRFSGSGSGT |
| | sequence | DYSLTISNLEQEDIATYFCQQGNTLPYTFGGGTKLEITGGGGSGG |
| | | GGSGGGGSEVKLQESGPGLVAPSQSLSVTCTVSGVSLPDYGVSWI |
| | | RQPPRKGLEWLGVIWGSETTYYNSALKSRLTIIKDNSKSQVFLKM |
| | | NSLQTDDTAIYYCAKHYYYGGSYAMDYWGQGTSVTVSSTTTPA |
| | | PRPPTPAPTIASQPLSLRPEACRPAAGGAVHTRGLDFACDIYIWAP |
| | | LAGTCGVLLLSLVITLYCKRGRKKLLYIFKQPFMRPVQTTQEEDG |
| | | CSCRFPEEEEGGCELRVKFSRSADAPAYKQGQNQLYNELNLGRR |
| | | EEYDVLDKRRGRDPEMGGKPRRKNPQEGLYNELQKDKMAEAY |
| | | SEIGMKGERRRGKGHDGLYQGLSTATKDTYDALHMQALPPR |
| SEQ ID | CTL019 Full | ATGGCCTTACCAGTGACCGCCTTGCTCCTGCCGCTGGCCTTGC |
| NO: 1056 | nucleotide | TGCTCCACGCCGCCAGGCCGGACATCCAGATGACACAGACTA |
| | sequence | CATCCTCCCTGTCTGCCTCTCTGGGAGACAGAGTCACCATCAG |
| | | TTGCAGGGCAAGTCAGGACATTAGTAAATATTTAAATTGGTAT |
| | | CAGCAGAAACCAGATGGAACTGTTAAACTCCTGATCTACCAT |
| | | ACATCAAGATTACACTCAGGAGTCCCATCAAGGTTCAGTGGC |
| | | AGTGGGTCTGGAACAGATTATTCTCTCACCATTAGCAACCTGG |
| | | AGCAAGAAGATATTGCCACTTACTTTTGCCAACAGGGTAATAC |
| | | GCTTCCGTACACGTTCGGAGGGGGGACCAAGCTGGAGATCAC |
| | | AGGTGGCGGTGGCTCGGGCGGTGGTGGGTCGGGTGGCGGCGG |
| | | ATCTGAGGTGAAACTGCAGGAGTCAGGACCTGGCCTGGTGGC |
| | | GCCCTCACAGAGCCTGTCCGTCACATGCACTGTCTCAGGGGTC |
| | | TCATTACCCGACTATGGTGTAAGCTGGATTCGCCAGCCTCCAC |
| | | GAAAGGGTCTGGAGTGGCTGGGAGTAATATGGGGTAGTGAAA |
| | | CCACATACTATAATTCAGCTCTCAAATCCAGACTGACCATCAT |
| | | CAAGGACAACTCCAAGAGCCAAGTTTTCTTAAAAATGAACAG |
| | | TCTGCAAACTGATGACACAGCCATTTACTACTGTGCCAAACAT |
| | | TATTACTACGGTGGTAGCTATGCTATGGACTACTGGGGCCAAG |
| | | GAACCTCAGTCACCGTCTCCTCAACCACGACGCCAGCGCCGCG |
| | | ACCACCAACACCGGCGCCCACCATCGCGTCGCAGCCCCTGTCC |
| | | CTGCGCCCAGAGGCGTGCCGGCCAGCGGCGGGGGGCGCAGTG |
| | | CACACGAGGGGGCTGGACTTCGCCTGTGATATCTACATCTGGG |
| | | CGCCCTTGGCCGGGACTTGTGGGGTCCTTCTCCTGTCACTGGT |
| | | TATCACCCTTTACTGCAAACGGGGCAGAAAGAAACTCCTGTAT |
| | | ATATTCAAACAACCATTTATGAGACCAGTACAAACTACTCAAG |
| | | AGGAAGATGGCTGTAGCTGCCGATTTCCAGAAGAAGAAGAAG |
| | | GAGGATGTGAACTGAGAGTGAAGTTCAGCAGGAGCGCAGACG |
| | | CCCCCGCGTACAAGCAGGGCCAGAACCAGCTCTATAACGAGC |
| | | TCAATCTAGGACGAAGAGAGGAGTACGATGTTTTGGACAAGA |
| | | GACGTGGCCGGGACCCTGAGATGGGGGGAAAGCCGAGAAGG |
| | | AAGAACCCTCAGGAAGGCCTGTACAATGAACTGCAGAAAGAT |
| | | AAGATGGCGGAGGCCTACAGTGAGATTGGGATGAAAGGCGAG |
| | | CGCCGGAGGGGCAAGGGGCACGATGGCCTTTACCAGGGTCTC |
| | | AGTACAGCCACCAAGGACACCTACGACGCCCTTCACATGCAG |
| | | GCCCTGCCCCCTCGC |
| SEQ ID | CTL019 | DIQMTQTTSSLSASLGDRVTISCRASQDISKYLNWYQQKPDGTVK |
| NO: 1057 | scFv domain | LLIYHTSRLHSGVPSRFSGSGSGTDYSLTISNLEQEDIATYFCQQG |
| | | NTLPYTFGGGTKLEITGGGGSGGGGSGGGGSEVKLQESGPGLVA |
| | | PSQSLSVTCTVSGVSLPDYGVSWIRQPPRKGLEWLGVIWGSETTY |
| | | YNSALKSRLTIIKDNSKSQVFLKMNSLQTDDTAIYYCAKHYYYG |
| | | GSYAMDYWGQGTSVTVSS |

mCAR1

| | | |
|---|---|---|
| SEQ ID | mCAR1 | QVQLLESGAELVRPGSSVKISCKASGYAFSSYWMNWVKQRPGQ |
| NO: 1058 | scFv | GLEWIGQIYPGDGDTNYNGKFKGQATLTADKSSSTAYMQLSGLT |
| | | SEDSAVYSCARKTISSVVDFYFDYWGQGTTVTGGGSGGGSGGGS |
| | | GGGSELVLTQSPKFMSTSVGDRVSVTCKASQNVGTNVAWYQQK |
| | | PGQSPKPLIYSATYRNSGVPDRFTGSGSGTDFTLTITNVQSKDLAD |
| | | YFCQYNRYPYTSFFFTKLEIKRRS |
| SEQ ID | mCAR1 Full | QVQLLESGAELVRPGSSVKISCKASGYAFSSYWMNWVKQRPGQ |
| NO: 1059 | amino acid | GLEWIGQIYPGDGDTNYNGKFKGQATLTADKSSSTAYMQLSGLT |
| | sequence | SEDSAVYSCARKTISSVVDFYFDYWGQGTTVTGGGSGGGSGGGS |
| | | GGGSELVLTQSPKFMSTSVGDRVSVTCKASQNVGTNVAWYQQK |
| | | PGQSPKPLIYSATYRNSGVPDRFTGSGSGTDFTLTITNVQSKDLAD |
| | | YFCQYNRYPYTSFFFTKLEIKRRSKIEVMYPPPYLDNEKSNGTIIH |
| | | VKGKHLCPSPLFPGPSKPFWVLVVVGGVLACYSLLVTVAFIIFWV |
| | | RSKRSRLLHSDYMNMTPRRPGPTRKHYQPYAPPRDFAAYRSRVK |
| | | FSRSADAPAYQQGQNQLYNELNLGRREEYDVLDKRRGRDPEMG |
| | | GKPRRKNPQEGLYNELQKDKMAEAYSEIGMKGERRRGKGHDGL |
| | | YQGLSTATKDTYDALHMQALPPR |

mCAR2

| | | |
|---|---|---|
| SEQ ID | mCAR2 | DIQMTQTTSSLSASLGDRVTISCRASQDISKYLNWYQQKPDGTVK |
| NO: 1060 | scFv | LLIYHTSRLHSGVPSRFSGSGSGTDYSLTISNLEQEDIATYFCQQG |
| | | NTLPYTFGGGTKLEITGSTSGSGKPGSGEGSTKGEVKLQESGPGL |
| | | VAPSQSLSVTCTVSGVSLPDYGVSWIRQPPRKGLEWLGVIWGSET |
| | | TYYNSALKSRLTIIKDNSKSQVFLKMNSLQTDDTAIYYCAKHYY |
| | | YGGSYAMDYWGQGTSVTVSSE |
| SEQ ID | mCAR2 | DIQMTQTTSSLSASLGDRVTISCRASQDISKYLNWYQQKPDGTVK |
| NO: 1061 | amino acid | LLIYHTSRLHSGVPSRFSGSGSGTDYSLTISNLEQEDIATYFCQQG |
| | sequence | NTLPYTFGGGTKLEITGSTSGSGKPGSGEGSTKGEVKLQESGPGL |
| | | VAPSQSLSVTCTVSGVSLPDYGVSWIRQPPRKGLEWLGVIWGSET |
| | | TYYNSALKSRLTIIKDNSKSQVFLKMNSLQTDDTAIYYCAKHYY |
| | | YGGSYAMDYWGQGTSVTVSSESKYGPPCPPCPMFWVLVVVGG |
| | | VLACYSLLVTVAFIIFWVKRGRKKLLYIFKQPFMRPVQTTQEEDG |
| | | CSCRFEEEEGGCELRVKFSRSADAPAYQQGQNQLYNELNLGRRE |
| | | EYDVLDKRRGRDPEMGGKPRRKNPQEGLYNELQKDKMAEAYS |
| | | EIGMKGERRRGKGHDGLYQGLSTATKDTYDALHMQALPPRL |
| SEQ ID | mCAR2 full | DIQMTQTTSSLSASLGDRVTISCRASQDISKYLNWYQQKPDGTVK |
| NO: 1062 | amino acid | LLIYHTSRLHSGVPSRFSGSGSGTDYSLTISNLEQEDIATYFCQQG |
| | sequence | NTLPYTFGGGTKLEITGSTSGSGKPGSGEGSTKGEVKLQESGPGL |
| | | VAPSQSLSVTCTVSGVSLPDYGVSWIRQPPRKGLEWLGVIWGSET |
| | | TYYNSALKSRLTIIKDNSKSQVFLKMNSLQTDDTAIYYCAKHYY |
| | | YGGSYAMDYWGQGTSVTVSSESKYGPPCPPCPMFWVLVVVGG |
| | | VLACYSLLVTVAFIIFWVKRGRKKLLYIFKQPFMRPVQTTQEEDG |
| | | CSCRFEEEEGGCELRVKFSRSADAPAYQQGQNQLYNELNLGRRE |
| | | EYDVLDKRRGRDPEMGGKPRRKNPQEGLYNELQKDKMAEAYS |
| | | EIGMKGERRRGKGHDGLYQGLSTATKDTYDALHMQALPPRLEG |
| | | GGEGRGSLLTCGDVEENPGPRMLLLVTSLLLCELPHPAFLLIPRK |
| | | VCNGIGIGEFKDSLSINATNIKHFKNCTSISGDLHILPVAFRGDSFT |
| | | HTPPLDPQELDILKTVKEITGFLLIQAWPENRTDLHAFENLEIIRGR |
| | | TKQHGQFSLAVVSLNITSLGLRSLKEISDGDVIISGNKNLCYANTI |
| | | NWKKLFGTSGQKTKIISNRGENSCKATGQVCHALCSPEGCWGPE |
| | | PRDCVSCRNVSRGRECVDKCNLLEGEPREFVENSECIQCHPECLP |
| | | QAMNITCTGRGPDNCIQCAHYIDGPHCVKTCPAGVMGENNTLV |
| | | WKYADAGHVCHLCHPNCTYGCTGPGLEGCPTNGPKIPSIATGMV |
| | | GALLLLLVVALGIGLFM |

mCAR3

| | | |
|---|---|---|
| SEQ ID | mCAR3 | DIQMTQTTSSLSASLGDRVTISCRASQDISKYLNWYQQKPDGTVK |
| NO: 1063 | scFv | LLIYHTSRLHSGVPSRFSGSGSGTDYSLTISNLEQEDIATYFCQQG |
| | | NTLPYTFGGGTKLEITGSTSGSGKPGSGEGSTKGEVKLQESGPGL |
| | | VAPSQSLSVTCTVSGVSLPDYGVSWIRQPPRKGLEWLGVIWGSET |
| | | TYYNSALKSRLTIIKDNSKSQVFLKMNSLQTDDTAIYYCAKHYY |
| | | YGGSYAMDYWGQGTSVTVSS |
| SEQ ID | mCAR3 full | DIQMTQTTSSLSASLGDRVTISCRASQDISKYLNWYQQKPDGTVK |
| NO: 1064 | amino acid | LLIYHTSRLHSGVPSRFSGSGSGTDYSLTISNLEQEDIATYFCQQG |
| | sequence | NTLPYTFGGGTKLEITGSTSGSGKPGSGEGSTKGEVKLQESGPGL |
| | | VAPSQSLSVTCTVSGVSLPDYGVSWIRQPPRKGLEWLGVIWGSET |
| | | TYYNSALKSRLTIIKDNSKSQVFLKMNSLQTDDTAIYYCAKHYY |
| | | YGGSYAMDYWGQGTSVTVSSAAAIEVMYPPPYLDNEKSNGTIIH |
| | | VKGKHLCPSPLFPGPSKPFWVLVVVGGVLACYSLLVTVAFIIFWV |
| | | RSKRSRLLHSDYMNMTPRRPGPTRKHYQPYAPPRDFAAYRSRVK |
| | | FSRSADAPAYQQGQNQLYNELNLGRREEYDVLDKRRGRDPEMG |
| | | GKPRRKNPQEGLYNELQKDKMAEAYSEIGMKGERRRGKGHDGL |
| | | YQGLSTATKDTYDALHMQALPPR |

SSJ25-C1

| | | |
|---|---|---|
| SEQ ID | SSJ25-C1 | QVQLLESGAELVRPGSSVKISCKASGYAFSSYWMNWVKQRPGQ |
| NO: 1065 | VH sequence | GLEWIGQIYPGDGDTNYNGKFKGQATLTADKSSSTAYMQLSGLT |
| | | SEDSAVYSCARKTISSVVDFYFDYWGQGTTVT |
| SEQ ID | SSJ25-C1 | ELVLTQSPKFMSTSVGDRVSVTCKASQNVGTNVAWYQQKPGQS |
| NO: 1066 | VL | PKPLIYSATYRNSGVPDRFTGSGSGTDFTLTITNVQSKDLADYFYF |
| | | CQYNRYPYTSGGGTKLEIKRRS |

Humanized CAR1

| | | |
|---|---|---|
| SEQ ID | CAR1 scFv | EIVMTQSPATLSLSPGERATLSCRASQDISKYLNWYQQKPGQAPR |
| NO: 1067 | domain | LLIYHTSRLHSGIPARFSGSGSGTDYTLTISSLQPEDFAVYFCQQG |
| | | NTLPYTFGQGTKLEIKGGGGSGGGGSGGGGSQVQLQESGPGLVK |
| | | PSETLSLTCTVSGVSLPDYGVSWIRQPPGKGLEWIGVIWGSETTY |
| | | YSSSLKSRVTISKDNSKNQVSLKLSSVTAADTAVYYCAKHYYYG |
| | | GSYAMDYWGQGTLVTVSS |
| SEQ ID | CAR 1-Full- | MALPVTALLLPLALLLHAARPEIVMTQSPATLSLSPGERATLSCR |
| NO: 1068 | aa | ASQDISKYLNWYQQKPGQAPRLLIYHTSRLHSGIPARFSGSGSGT |
| | | DYTLTISSLQPEDFAVYFCQQGNTLPYTFGQGTKLEIKGGGGSGG |
| | | GGSGGGGSQVQLQESGPGLVKPSETLSLTCTVSGVSLPDYGVSWI |
| | | RQPPGKGLEWIGVIWGSETTYYSSSLKSRVTISKDNSKNQVSLKL |
| | | SSVTAADTAVYYCAKHYYYGGSYAMDYWGQGTLVTVSSTTTP |
| | | APRPPTPAPTIASQPLSLRPEACRPAAGGAVHTRGLDFACDIYIWA |
| | | PLAGTCGVLLLSLVITLYCKRGRKKLLYIFKQPFMRPVQTTQEED |
| | | GCSCRFPEEEEGGCELRVKFSRSADAPAYKQGQNQLYNELNLGR |
| | | REEYDVLDKRRGRDPEMGGKPRRKNPQEGLYNELQKDKMAEA |
| | | YSEIGMKGERRRGKGHDGLYQGLSTATKDTYDALHMQALPPR |

Humanized CAR2

| | | |
|---|---|---|
| SEQ ID | CAR2 scFv | EIVMTQSPATLSLSPGERATLSCRASQDISKYLNWYQQKPGQAPR |
| NO: 1069 | domain-aa | LLIYHTSRLHSGIPARFSGSGSGTDYTLTISSLQPEDFAVYFCQQG |
| | (Linker is | NTLPYTFGQGTKLEIKGGGGSGGGGSGGGGSQVQLQESGPGLVK |
| | underlined) | PSETLSLTCTVSGVSLPDYGVSWIRQPPGKGLEWIGVIWGSETTY |
| | | YQSSLKSRVTISKDNSKNQVSLKLSSVTAADTAVYYCAKHYYYG |
| | | GSYAMDYWGQGTLVTVSS |
| SEQ ID | CAR2 scFv | atggccctccctgtcaccgccctgctgcttccgctggctcttctgctccacgccgctcggcccgaaattg |
| NO: 1070 | domain-nt | tgatgacccagtcacccgccactcttagcctttcacccggtgagcgcgcaaccctgtcttgcagagcct |
| | | cccaagacatctcaaaataccttaattggtatcaacagaagcccggacaggctcctcgccttctgatcta |
| | | ccacaccagccggctccattctggaatccctgccaggttcagcggtagcggatctgggaccgactaca |
| | | ccctcactatcagctcactgcagccagaggacttcgctgtctatttctgtcagcaagggaacaccctgcc |
| | | ctacacctttggacagggcaccaagctcgagattaaaggtggaggtggcagcggaggaggtgggtcc |
| | | ggcggtggaggaagccaggtccaactccaagaaagcggaccgggtcttgtgaagccatcagaaact |
| | | ctttcactgacttgtactgtgagcggagtgtctctccccgattacggggtgtcttggatcagacagccacc |
| | | ggggaagggtctggaatggattggagtgatttggggctctgagactacttactaccaatcatccctcaag |
| | | tcacgcgtcaccatctcaaaggacaactctaagaatcaggtgtcactgaaactgtcatctgtgaccgcag |
| | | ccgacaccgccgtgtactattgcgctaagcattactattatggcgggagctacgcaatggattactgggg |
| | | acagggtactctggtcaccgtgtccagccaccaccatcatcaccatcaccat |
| SEQ ID | CAR 2-Full- | MALPVTALLLPLALLLHAARPEIVMTQSPATLSLSPGERATLSCR |
| NO: 1071 | aa | ASQDISKYLNWYQQKPGQAPRLLIYHTSRLHSGIPARFSGSGSGT |
| | | DYTLTISSLQPEDFAVYFCQQGNTLPYTFGQGTKLEIKGGGGSGG |
| | | GGSGGGGSQVQLQESGPGLVKPSETLSLTCTVSGVSLPDYGVSWI |
| | | RQPPGKGLEWIGVIWGSETTYYQSSLKSRVTISKDNSKNQVSLKL |
| | | SSVTAADTAVYYCAKHYYYGGSYAMDYWGQGTLVTVSSTTTP |
| | | APRPPTPAPTIASQPLSLRPEACRPAAGGAVHTRGLDFACDIYIWA |
| | | PLAGTCGVLLLSLVITLYCKRGRKKLLYIFKQPFMRPVQTTQEED |
| | | GCSCRFPEEEEGGCELRVKFSRSADAPAYKQGQNQLYNELNLGR |
| | | REEYDVLDKRRGRDPEMGGKPRRKNPQEGLYNELQKDKMAEA |
| | | YSEIGMKGERRRGKGHDGLYQGLSTATKDTYDALHMQALPPR |
| SEQ ID | CAR 2- | EIVMTQSPATLSLSPGERATLSCRASQDISKYLNWYQQKPGQAPR |
| NO: 3207 | Full-aa; no | LLIYHTSRLHSGIPARFSGSGSGTDYTLTISSLQPEDFAVYFCQQG |
| | leader | NTLPYTFGQGTKLEIKGGGGSGGGGSGGGGSQVQLQESGPGLVK |
| | | PSETLSLTCTVSGVSLPDYGVSWIRQPPGKGLEWIGVIWGSETTY |
| | | YQSSLKSRVTISKDNSKNQVSLKLSSVTAADTAVYYCAKHYYYG |
| | | GSYAMDYWGQGTLVTVSSTTTPAPRPPTPAPTIASQPLSLRPEAC |
| | | RPAAGGAVHTRGLDFACDIYIWAPLAGTCGVLLLSLVITLYCKR |
| | | GRKKLLYIFKQPFMRPVQTTQEEDGCSCRFPEEEEGGCELRVKFS |
| | | RSADAPAYKQGQNQLYNELNLGRREEYDVLDKRRGRDPEMGG |
| | | KPRRKNPQEGLYNELQKDKMAEAYSEIGMKGERRRGKGHDGLY |
| | | QGLSTATKDTYDALHMQALPPR |
| SEQ ID | CAR 2-Full- | atggccctccctgtcaccgccctgctgcttccgctggctcttctgctccacgccgctcggcccgaaattg |
| NO: 1072 | nt | tgatgacccagtcacccgccactcttagcctttcacccggtgagcgcgcaaccctgtcttgcagagcct |
| | | cccaagacatctcaaaataccttaattggtatcaacagaagcccggacaggctcctcgccttctgatcta |
| | | ccacaccagccggctccattctggaatccctgccaggttcagcggtagcggatctgggaccgactaca |
| | | ccctcactatcagctcactgcagccagaggacttcgctgtctatttctgtcagcaagggaacaccctgcc |
| | | ctacacctttggacagggcaccaagctcgagattaaaggtggaggtggcagcggaggaggtgggtcc |
| | | ggcggtggaggaagccaggtccaactccaagaaagcggaccgggtcttgtgaagccatcagaaact |
| | | ctttcactgacttgtactgtgagcggagtgtctctccccgattacggggtgtcttggatcagacagccacc |
| | | ggggaagggtctggaatggattggagtgatttggggctctgagactacttactaccaatcatccctcaag |
| | | tcacgcgtcaccatctcaaaggacaactctaagaatcaggtgtcactgaaactgtcatctgtgaccgcag |
| | | ccgacaccgccgtgtactattgcgctaagcattactattatggcgggagctacgcaatggattactgggg |
| | | acagggtactctggtcaccgtgtccagcaccactaccccagcaccgaggccacccaccccggctcct |
| | | accatcgcctcccagcctctgtccctgcgtccggaggcatgtagacccgcagctggtggggccgtgca |
| | | tacccggggtcttgacttcgcctgcgatatctacatttgggcccctctggctggtacttgcggggtcctgc |
| | | tgctttcactcgtgatcactctttactgtaagcgcggtcggaagaagctgctgtacatctttaagcaaccc |
| | | ttcatgaggcctgtgcagactactcaagaggaggacggctgttcatgccggttcccagaggaggagga |
| | | aggcggctgcgaactgcgcgtgaaattcagccgcagcgcagatgctccagcctacaagcaggggca |
| | | gaaccagctctacaacgaactcaatcttggtcggagagaggagtacgacgtgctggacaagcggaga |
| | | ggacgggacccagaaatgggcgggaagccgcgcagaaagaatccccaagagggcctgtacaacg |
| | | agctccaaaaggataagatggcagaagcctatagcgagattggtatgaaaggggaacgcagaagag |
| | | gcaaaggccacgacggactgtaccagggactcagcaccgccaccaaggacacctatgacgctcttca |
| | | catgcaggccctgccgcctcgg |
| SEQ ID | CAR 2- | gaaattgtgatgacccagtcacccgccactcttagcctttcacccggtgagcgcgcaaccctgtcttgca |
| NO: 3208 | Full-nt; no | gagcctcccaagacatctcaaaataccttaattggtatcaacagaagcccggacaggctcctcgccttct |
| | leader | gatctaccacaccagccggctccattctggaatccctgccaggttcagcggtagcggatctgggaccg |
| | | actacaccctcactatcagctcactgcagccagaggacttcgctgtctatttctgtcagcaagggaacac |
| | | cctgccctacacctttggacagggcaccaagctcgagattaaaggtggaggtggcagcggaggaggt |
| | | gggtccggcggtggaggaagccaggtccaactccaagaaagcggaccgggtcttgtgaagccatca |
| | | gaaactctttcactgacttgtactgtgagcggagtgtctctccccgattacggggtgtcttggatcagaca |
| | | gccaccggggaagggtctggaatggattggagtgatttggggctctgagactacttactaccaatcatc |
| | | cctcaagtcacgcgtcaccatctcaaaggacaactctaagaatcaggtgtcactgaaactgtcatctgtg |
| | | accgcagccgacaccgccgtgtactattgcgctaagcattactattatggcgggagctacgcaatggat |
| | | tactggggacagggtactctggtcaccgtgtccagcaccactaccccagcaccgaggccacccaccc |
| | | cggctcctaccatcgcctcccagcctctgtccctgcgtccggaggcatgtagacccgcagctggtggg |
| | | gccgtgcatacccggggtcttgacttcgcctgcgatatctacatttgggcccctctggctggtacttgcgg |
| | | ggtcctgctgctttcactcgtgatcactctttactgtaagcgcggtcggaagaagctgctgtacatctttaa |
| | | gcaacccttcatgaggcctgtgcagactactcaagaggaggacggctgttcatgccggttcccagagg |
| | | aggaggaaggggctgcgaactgcgcgtgaaattcagccgcagcgcagatgctccagcctacaagc |
| | | aggggcagaaccagctctacaacgaactcaatcttggtcggagagaggagtacgacgtgctggacaa |
| | | gcggagaggacgggacccagaaatgggcgggaagccgcgcagaaagaatccccaagagggcctg |
| | | tacaacgagctccaaaaggataagatggcagaagcctatagcgagattggtatgaaaggggaacgca |
| | | gaagaggcaaaggccacgacggactgtaccagggactcagcaccgccaccaaggacacctatgac |
| | | gctcttcacatgcaggccctgccgcctcgg |
| SEQ ID | CAR 2- | atggccctccctgtcaccgccctgctgcttccgctggctcttctgctccacgc |
| NO: 3209 | Full-nt with | cgctcggcccgaaattgtgatgacccagtcacccgccactcttagcctttcac |
| | hairpin | ccggtgagcgcgcaaccctgtcttgcagagcctcccaagacatctcaaaatac |
| | modification | cttaattggtatcaacagaagcccggacaggctcctcgccttctgatctacca |
| | | caccagccggctccattctggaatccctgccaggttcagcggtagcggatctg |
| | | ggaccgactacaccctcactatcagctcactgcagccagaggacttcgctgtc |
| | | tatttctgtcagcaagggaacaccctgccctacacctttggacagggcaccaa |
| | | gctcgagattaaaggtggaggtggcagcggaggaggtgggtccggcggtggag |
| | | gaagccaggtccaactccaagaaagcggaccgggtcttgtgaagccatcagaa |
| | | actctttcactgacttgtactgtgagcggagtgtctctccccgattacggggt |
| | | gtcttggatcagacagccaccggggaagggtctggaatggattggagtgattt |
| | | ggggctcAgagactacttactaccaatcatccctcaagtcTcgcgtcaccatc |
| | | tcaaaggacaactctaagaatcaggtgtcactgaaactgtcatctgtgaccgc |
| | | agccgacaccgccgtgtactattgcgctaagcattactattatggcgggagct |
| | | acgcaatggattactggggacagggtactctggtcaccgtgtccagcaccact |
| | | accccagcaccgaggccacccaccccggctcctaccatcgcctcccagcctct |
| | | gtccctgcgtccggaggcatgtagacccgcagctggtggggccgtgcataccc |
| | | ggggtcttgacttcgcctgcgatatctacatttgggcccctctggctggtact |
| | | tgcggggtcctgctgctttcactcgtgatcactctttactgtaagcgcggtcg |
| | | gaagaagctgctgtacatctttaagcaacccttcatgaggcctgtgcagacta |
| | | ctcaagaggaggacggctgttcatgccggttcccagaggaggaggaaggcggc |
| | | tgcgaactgcgcgtgaaattcagccgcagcgcagatgctccagcctacAagca |
| | | ggggcagaaccagctctacaacgaactcaatcttggtcggagagaggagtacg |
| | | acgtgctggacaagcggagaggacgggacccagaaatgggcgggaagccgcgc |
| | | agaaagaatccccaagagggcctgtacaacgagctccaaaaggataagatggc |
| | | agaagcctatagcgagattggtatgaaaggggaacgcagaagaggcaaaggcc |
| | | acgacggactgtaccagggactcagcaccgccaccaaggacacctatgacgct |
| | | cttcacatgcaggccctgccgcctcgg |
| SEQ ID | CAR 2- | gaaattgtgatgacccagtcacccgccactcttagcctttcacccggtgagcg |
| NO: 3210 | Full-nt with | cgcaaccctgtcttgcagagcctcccaagacatctcaaaataccttaattggt |
| | hairpin | atcaacagaagcccggacaggctcctcgccttctgatctaccacaccagccgg |
| | modification | ctccattctggaatccctgccaggttcagcggtagcggatctgggaccgacta |
| | and no leader | caccctcactatcagctcactgcagccagaggacttcgctgtctatttctgtc |
| | | agcaagggaacaccctgccctacacctttggacagggcaccaagctcgagatt |
| | | aaaggtggaggtggcagcggaggaggtgggtccggcggtggaggaagccaggt |
| | | ccaactccaagaaagcggaccgggtcttgtgaagccatcagaaactctttcac |
| | | tgacttgtactgtgagcggagtgtctctccccgattacggggtgtcttggatc |
| | | agacagccaccggggaagggtctggaatggattggagtgatttggggctcAga |
| | | gactacttactaccaatcatccctcaagtcTcgcgtcaccatctcaaaggaca |
| | | actctaagaatcaggtgtcactgaaactgtcatctgtgaccgcagccgacacc |
| | | gccgtgtactattgcgctaagcattactattatggcgggagctacgcaatgga |
| | | ttactggggacagggtactctggtcaccgtgtccagcaccactaccccagcac |
| | | cgaggccacccaccccggctcctaccatcgcctcccagcctctgtccctgcgt |
| | | ccggaggcatgtagacccgcagctggtggggccgtgcatacccggggtcttga |
| | | cttcgcctgcgatatctacatttgggcccctctggctggtacttgcggggtcc |
| | | tgctgctttcactcgtgatcactctttactgtaagcgcggtcggaagaagctg |
| | | ctgtacatctttaagcaacccttcatgaggcctgtgcagactactcaagagga |
| | | ggacggctgttcatgccggttcccagaggaggaggaaggcggctgcgaactgc |
| | | gcgtgaaattcagccgcagcgcagatgctccagcctacAagcaggggcagaac |
| | | cagctctacaacgaactcaatcttggtcggagagaggagtacgacgtgctgga |
| | | caagcggagaggacgggacccagaaatgggcgggaagccgcgcagaaagaatc |
| | | cccaagagggcctgtacaacgagctccaaaaggataagatggcagaagcctat |
| | | agcgagattggtatgaaaggggaacgcagaagaggcaaaggccacgacggact |
| | | gtaccagggactcagcaccgccaccaaggacacctatgacgctcttcacatgc |
| | | aggccctgccgcctcgg |
| SEQ ID | CAR2- | MALPVTALLLPLALLLHAARPeivmtqspatlslspgeratlscrasqdiskylnw |
| NO: 1073 | Soluble scFv- | yqqkpgqaprlliyhtsrlhsgiparfsgsgsgtdytltisslqpedfavyfcqqgntlpytfgqgtklei |
| | aa | kggggsggggsggggsqvqlqesgpglvkpsetlsltctvsgvslpdygvswirqppgkglewig |
| | | viwgsettyyqsslksrvtiskdnsknqvslklssvtaadtavyycakhyyyggsyamdywgqgtl |
| | | vtvsshhhhhhhh |
| SEQ ID | CAR 2A- | MALPVTALLLPLALLLHAARPEIVMTQSPATLSLSPGERATLSCRASQDISKY |
| NO: 3202 | Full-aa; | LNWYQQKPGQAPRLLIYHTSRLHSGIPARFSGSGSGTDYTLTISSLQPEDFAV |
| | leader | YFCQQGNTLPYTFGQGTKLEIKGGGGSGGGGSGGGGSQVQLQESGPGLVKPSE |
| | underlined | TLSLTCTVSGVSLPDYGVSWIRQPPGKGLEWIGVIWGSETTYYQSSLKSRVTI |
| | | SKDNSKNQVSLKLSSVTAADTAVYYCAKHYYYGGSYAMDYWGQGTLVTVSSTT |
| | | TPAPRPPTPAPTIASQPLSLRPEACRPAAGGAVHTRGLDFACDIYIWAPLAGT |
| | | CGVLLLSLVITLYCKRGRKKLLYIFKQPFMRPVQTTQEEDGCSCRFPEEEEGG |
| | | CELRVKFSRSADAPAYQQGQNQLYNELNLGRREEYDVLDKRRGRDPEMGGKPR |
| | | RKNPQEGLYNELQKDKMAEAYSEIGMKGERRRGKGHDGLYQGLSTATKDTYDA |
| | | LHMQALPPR |
| SEQ ID | CAR 2A- | EIVMTQSPATLSLSPGERATLSCRASQDISKYLNWYQQKPGQAPRLLIYHTSR |
| NO: 3203 | Full-aa; no | LHSGIPARFSGSGSGTDYTLTISSLQPEDFAVYFCQQGNTLPYTFGQGTKLEI |
| | leader | KGGGGSGGGGSGGGGSQVQLQESGPGLVKPSETLSLTCTVSGVSLPDYGVSWI |
| | | RQPPGKGLEWIGVIWGSETTYYQSSLKSRVTISKDNSKNQVSLKLSSVTAADT |
| | | AVYYCAKHYYYGGSYAMDYWGQGTLVTVSSTTTPAPRPPTPAPTIASQPLSLR |
| | | PEACRPAAGGAVHTRGLDFACDIYIWAPLAGTCGVLLLSLVITLYCKRGRKKL |
| | | LYIFKQPFMRPVQTTQEEDGCSCRFPEEEEGGCELRVKFSRSADAPAYQQGQN |
| | | QLYNELNLGRREEYDVLDKRRGRDPEMGGKPRRKNPQEGLYNELQKDKMAEAY |
| | | SEIGMKGERRRGKGHDGLYQGLSTATKDTYDALHMQALPPR |
| SEQ ID | CAR 2A- | atggccctccctgtcaccgccctgctgcttccgctggctcttctgctccacgccgctcggcccgaaattg |
| NO: 3211 | Full-nt; | tgatgacccagtcacccgccactcttagcctttcacccggtgagcgcgcaaccctgtcttgcagagcct |
| | leader | cccaagacatctcaaaataccttaattggtatcaacagaagcccggacaggctcctcgccttctgatcta |
| | underlined | ccacaccagccggctccattctggaatccctgccaggttcagcggtagcggatctgggaccgactaca |
| | | ccctcactatcagctcactgcagccagaggacttcgctgtctatttctgtcagcaagggaacaccctgcc |
| | | ctacacctttggacagggcaccaagctcgagattaaaggtggaggtggcagcggaggaggtgggtcc |
| | | ggcggtggaggaagccaggtccaactccaagaaagcggaccgggtcttgtgaagccatcagaaact |
| | | ctttcactgacttgtactgtgagcggagtgtctctccccgattacggggtgtcttggatcagacagccacc |
| | | ggggaagggtctggaatggattggagtgatttggggctctgagactacttactaccaatcatccctcaag |
| | | tcacgcgtcaccatctcaaaggacaactctaagaatcaggtgtcactgaaactgtcatctgtgaccgcag |
| | | ccgacaccgccgtgtactattgcgctaagcattactattatggcgggagctacgcaatggattactgggg |
| | | acagggtactctggtcaccgtgtccagcaccactaccccagcaccgaggccacccaccccggctcct |
| | | accatcgcctcccagcctctgtccctgcgtccggaggcatgtagacccgcagctggtggggccgtgca |
| | | tacccggggtcttgacttcgcctgcgatatctacatttgggcccctctggctggtacttgcggggtcctgc |
| | | tgctttcactcgtgatcactctttactgtaagcgcggtcggaagaagctgctgtacatctttaagcaaccct |
| | | tcatgaggcctgtgcagactactcaagaggaggacggctgttcatgccggttcccagaggaggagga |
| | | aggcggctgcgaactgcgcgtgaaattcagccgcagcgcagatgctccagcctaccagcaggggca |
| | | gaaccagctctacaacgaactcaatcttggtcggagagaggagtacgacgtgctggacaagcggaga |
| | | ggacgggacccagaaatgggcgggaagccgcgcagaaagaatccccaagagggcctgtacaacg |
| | | agctccaaaaggataagatggcagaagcctatagcgagattggtatgaaaggggaacgcagaagag |
| | | gcaaaggccacgacggactgtaccagggactcagcaccgccaccaaggacacctatgacgctcttca |
| | | catgcaggccctgccgcctcgg |
| SEQ ID | CAR 2A- | gaaattgtgatgacccagtcacccgccactcttagcctttcacccggtgagcgcgcaaccctgtcttgca |
| NO: 3212 | Full-nt; no | gagcctcccaagacatctcaaaataccttaattggtatcaacagaagcccggacaggctcctcgccttct |
| | leader | gatctaccacaccagccggctccattctggaatccctgccaggttcagcggtagcggatctgggaccg |
| | | actacaccctcactatcagctcactgcagccagaggacttcgctgtctatttctgtcagcaagggaacac |
| | | cctgccctacacctttggacagggcaccaagctcgagattaaaggtggaggtggcagcggaggaggt |
| | | gggtccggcggtggaggaagccaggtccaactccaagaaagcggaccgggtcttgtgaagccatca |
| | | gaaactctttcactgacttgtactgtgagcggagtgtctctccccgattacggggtgtcttggatcagaca |
| | | gccaccggggaagggtctggaatggattggagtgatttggggctctgagactacttactaccaatcatc |
| | | cctcaagtcacgcgtcaccatctcaaaggacaactctaagaatcaggtgtcactgaaactgtcatctgtg |
| | | accgcagccgacaccgccgtgtactattgcgctaagcattactattatggcgggagctacgcaatggat |
| | | tactggggacagggtactctggtcaccgtgtccagcaccactaccccagcaccgaggccacccaccc |
| | | cggctcctaccatcgcctcccagcctctgtccctgcgtccggaggcatgtagacccgcagctggtggg |
| | | gccgtgcatacccggggtcttgacttcgcctgcgatatctacatttgggcccctctggctggtacttgcgg |
| | | ggtcctgctgctttcactcgtgatcactctttactgtaagcgcggtcggaagaagctgctgtacatctttaa |
| | | gcaacccttcatgaggcctgtgcagactactcaagaggaggacggctgttcatgccggttcccagagg |
| | | aggaggaaggcggctgcgaactgcgcgtgaaattcagccgcagcgcagatgctccagcctaccagc |
| | | aggggcagaaccagctctacaacgaactcaatcttggtcggagagaggagtacgacgtgctggacaa |
| | | gcggagaggacgggacccagaaatgggcgggaagccgcgcagaaagaatccccaagagggcctg |
| | | tacaacgagctccaaaaggataagatggcagaagcctatagcgagattggtatgaaaggggaacgca |
| | | gaagaggcaaaggccacgacggactgtaccagggactcagcaccgccaccaaggacacctatgac |
| | | gctcttcacatgcaggccctgccgcctcgg |
| SEQ ID | CAR 2A- | atggccctccctgtcaccgccctgctgcttccgctggctcttctgctccacgc |
| NO: 3213 | Full-nt; | cgctcggcccgaaattgtgatgacccagtcacccgccactcttagcctttcac |
| | with hairpin | ccggtgagcgcgcaaccctgtcttgcagagcctcccaagacatctcaaaatac |
| | modification | cttaattggtatcaacagaagcccggacaggctcctcgccttctgatctacca |
| | and leader | caccagccggctccattctggaatccctgccaggttcagcggtagcggatctg |
| | underlined | ggaccgactacaccctcactatcagctcactgcagccagaggacttcgctgtc |
| | | tatttctgtcagcaagggaacaccctgccctacacctttggacagggcaccaa |
| | | gctcgagattaaaggtggaggtggcagcggaggaggtgggtccggcggtggag |
| | | gaagccaggtccaactccaagaaagcggaccgggtcttgtgaagccatcagaa |
| | | actctttcactgacttgtactgtgagcggagtgtctctccccgattacggggt |
| | | gtcttggatcagacagccaccggggaagggtctggaatggattggagtgattt |
| | | ggggctcAgagactacttactaccaatcatccctcaagtcTcgcgtcaccatc |
| | | tcaaaggacaactctaagaatcaggtgtcactgaaactgtcatctgtgaccgc |
| | | agccgacaccgccgtgtactattgcgctaagcattactattatggcgggagct |
| | | acgcaatggattactggggacagggtactctggtcaccgtgtccagcaccact |
| | | accccagcaccgaggccacccaccccggctcctaccatcgcctcccagcctct |
| | | gtccctgcgtccggaggcatgtagacccgcagctggtggggccgtgcataccc |
| | | ggggtcttgacttcgcctgcgatatctacatttgggcccctctggctggtact |
| | | tgcggggtcctgctgctttcactcgtgatcactctttactgtaagcgcggtcg |
| | | gaagaagctgctgtacatctttaagcaacccttcatgaggcctgtgcagacta |
| | | ctcaagaggaggacggctgttcatgccggttcccagaggaggaggaaggcggc |
| | | tgcgaactgcgcgtgaaattcagccgcagcgcagatgctccagcctacCagca |
| | | ggggcagaaccagctctacaacgaactcaatcttggtcggagagaggagtacg |
| | | acgtgctggacaagcggagaggacgggacccagaaatgggcgggaagccgcgc |
| | | agaaagaatccccaagagggcctgtacaacgagctccaaaaggataagatggc |
| | | agaagcctatagcgagattggtatgaaaggggaacgcagaagaggcaaaggcc |
| | | acgacggactgtaccagggactcagcaccgccaccaaggacacctatgacgct |
| | | cttcacatgcaggccctgccgcctcgg |
| SEQ ID | CAR 2A- | gaaattgtgatgacccagtcacccgccactcttagcctttcacccggtgagcg |
| NO: 3214 | Full-nt; | cgcaaccctgtcttgcagagcctcccaagacatctcaaaataccttaattggt |
| | with hairpin | atcaacagaagcccggacaggctcctcgccttctgatctaccacaccagccgg |
| | modification | ctccattctggaatccctgccaggttcagcggtagcggatctgggaccgacta |
| | and no leader | caccctcactatcagctcactgcagccagaggacttcgctgtctatttctgtc |
| | | agcaagggaacaccctgccctacacctttggacagggcaccaagctcgagatt |
| | | aaaggtggaggtggcagcggaggaggtgggtccggcggtggaggaagccaggt |
| | | ccaactccaagaaagcggaccgggtcttgtgaagccatcagaaactctttcac |
| | | tgacttgtactgtgagcggagtgtctctccccgattacggggtgtcttggatc |
| | | agacagccaccggggaagggtctggaatggattggagtgatttggggctcAga |
| | | gactacttactaccaatcatccctcaagtcTcgcgtcaccatctcaaaggaca |
| | | actctaagaatcaggtgtcactgaaactgtcatctgtgaccgcagccgacacc |
| | | gccgtgtactattgcgctaagcattactattatggcgggagctacgcaatgga |
| | | ttactggggacagggtactctggtcaccgtgtccagcaccactaccccagcac |
| | | cgaggccacccaccccggctcctaccatcgcctcccagcctctgtccctgcgt |
| | | ccggaggcatgtagacccgcagctggtggggccgtgcatacccggggtcttga |
| | | cttcgcctgcgatatctacatttgggcccctctggctggtacttgcggggtcc |
| | | tgctgctttcactcgtgatcactctttactgtaagcgcggtcggaagaagctg |
| | | ctgtacatctttaagcaacccttcatgaggcctgtgcagactactcaagagga |
| | | ggacggctgttcatgccggttcccagaggaggaggaaggcggctgcgaactgc |
| | | gcgtgaaattcagccgcagcgcagatgctccagcctacCagcaggggcagaac |
| | | cagctctacaacgaactcaatcttggtcggagagaggagtacgacgtgctgga |
| | | caagcggagaggacgggacccagaaatgggcgggaagccgcgcagaaagaatc |
| | | cccaagagggcctgtacaacgagctccaaaaggataagatggcagaagcctat |
| | | agcgagattggtatgaaaggggaacgcagaagaggcaaaggccacgacggact |
| | | gtaccagggactcagcaccgccaccaaggacacctatgacgctcttcacatgc |
| | | aggccctgccgcctcgg |

Humanized CAR3

| | | |
|---|---|---|
| SEQ ID | CAR3 scFv | QVQLQESGPGLVKPSETLSLTCTVSGVSLPDYGVSWIRQPPGKGL |
| NO: 1074 | domain | EWIGVIWGSETTYYSSSLKSRVTISKDNSKNQVSLKLSSVTAADT |
| | | AVYYCAKHYYYGGSYAMDYWGQGTLVTVSSGGGGSGGGGSG |
| | | GGGSEIVMTQSPATLSLSPGERATLSCRASQDISKYLNWYQQKPG |
| | | QAPRLLIYHTSRLHSGIPARFSGSGSGTDYTLTISSLQPEDFAVYFC |
| | | QQGNTLPYTFGQGTKLEIK |
| SEQ ID | CAR 3-Full- | MALPVTALLLPLALLLHAARPQVQLQESGPGLVKPSETLSLTCTV |
| NO: 1075 | aa | SGVSLPDYGVSWIRQPPGKGLEWIGVIWGSETTYYSSSLKSRVTIS |
| | | KDNSKNQVSLKLSSVTAADTAVYYCAKHYYYGGSYAMDYWGQ |
| | | GTLVTVSSGGGGSGGGGSGGGGSEIVMTQSPATLSLSPGERATLS |
| | | CRASQDISKYLNWYQQKPGQAPRLLIYHTSRLHSGIPARFSGSGS |
| | | GTDYTLTISSLQPEDFAVYFCQQGNTLPYTFGQGTKLEIKTTTPAP |
| | | RPPTPAPTIASQPLSLRPEACRPAAGGAVHTRGLDFACDIYIWAPL |
| | | AGTCGVLLLSLVITLYCKRGRKKLLYIFKQPFMRPVQTTQEEDGC |
| | | SCRFPEEEEGGCELRVKFSRSADAPAYKQGQNQLYNELNLGRRE |
| | | EYDVLDKRRGRDPEMGGKPRRKNPQEGLYNELQKDKMAEAYS |
| | | EIGMKGERRRGKGHDGLYQGLSTATKDTYDALHMQALPPR |

Humanized CAR4

| | | |
|---|---|---|
| SEQ ID | CAR4 scFv | QVQLQESGPGLVKPSETLSLTCTVSGVSLPDYGVSWIRQPPGKGL |
| NO: 1076 | domain | EWIGVIWGSETTYYQSSLKSRVTISKDNSKNQVSLKLSSVTAADT |
| | | AVYYCAKHYYYGGSYAMDYWGQGTLVTVSSGGGGSGGGGSG |
| | | GGGSEIVMTQSPATLSLSPGERATLSCRASQDISKYLNWYQQKPG |
| | | QAPRLLIYHTSRLHSGIPARFSGSGSGTDYTLTISSLQPEDFAVYFC |
| | | QQGNTLPYTFGQGTKLEIK |
| SEQ ID | CAR 4-Full- | MALPVTALLLPLALLLHAARPQVQLQESGPGLVKPSETLSLTCTV |
| NO: 1077 | aa | SGVSLPDYGVSWIRQPPGKGLEWIGVIWGSETTYYQSSLKSRVTI |
| | | SKDNSKNQVSLKLSSVTAADTAVYYCAKHYYYGGSYAMDYWG |
| | | QGTLVTVSSGGGGSGGGGSGGGGSEIVMTQSPATLSLSPGERATL |
| | | SCRASQDISKYLNWYQQKPGQAPRLLIYHTSRLHSGIPARFSGSG |
| | | SGTDYTLTISSLQPEDFAVYFCQQGNTLPYTFGQGTKLEIKTTTPA |
| | | PRPPTPAPTIASQPLSLRPEACRPAAGGAVHTRGLDFACDIYIWAP |
| | | LAGTCGVLLLSLVITLYCKRGRKKLLYIFKQPFMRPVQTTQEEDG |
| | | CSCRFPEEEEGGCELRVKFSRSADAPAYKQGQNQLYNELNLGRR |
| | | EEYDVLDKRRGRDPEMGGKPRRKNPQEGLYNELQKDKMAEAY |
| | | SEIGMKGERRRGKGHDGLYQGLSTATKDTYDALHMQALPPR |

Humanized CAR5

| | | |
|---|---|---|
| SEQ ID | CAR5 scFv | EIVMTQSPATLSLSPGERATLSCRASQDISKYLNWYQQKPGQAPR |
| NO: 1078 | domain | LLIYHTSRLHSGIPARFSGSGSGTDYTLTISSLQPEDFAVYFCQQG |
| | | NTLPYTFGQGTKLEIKGGGGSGGGGSGGGGSGGGGSQVQLQESG |
| | | PGLVKPSETLSLTCTVSGVSLPDYGVSWIRQPPGKGLEWIGVIWG |
| | | SETTYYSSSLKSRVTISKDNSKNQVSLKLSSVTAADTAVYYCAKH |
| | | YYYGGSYAMDYWGQGTLVTVSS |
| SEQ ID | CAR 5-Full- | MALPVTALLLPLALLLHAARPEIVMTQSPATLSLSPGERATLSCR |
| NO: 1079 | aa | ASQDISKYLNWYQQKPGQAPRLLIYHTSRLHSGIPARFSGSGSGT |
| | | DYTLTISSLQPEDFAVYFCQQGNTLPYTFGQGTKLEIKGGGGSGG |
| | | GGSGGGGSGGGGSQVQLQESGPGLVKPSETLSLTCTVSGVSLPD |
| | | YGVSWIRQPPGKGLEWIGVIWGSETTYYSSSLKSRVTISKDNSKN |
| | | QVSLKLSSVTAADTAVYYCAKHYYYGGSYAMDYWGQGTLVTV |
| | | SSTTTPAPRPPTPAPTIASQPLSLRPEACRPAAGGAVHTRGLDFAC |
| | | DIYIWAPLAGTCGVLLLSLVITLYCKRGRKKLLYIFKQPFMRPVQ |
| | | TTQEEDGCSCRFPEEEEGGCELRVKFSRSADAPAYKQGQNQLYN |
| | | ELNLGRREEYDVLDKRRGRDPEMGGKPRRKNPQEGLYNELQKD |
| | | KMAEAYSEIGMKGERRRGKGHDGLYQGLSTATKDTYDALHMQ |
| | | ALPPR |

Humanized CAR6

| | | |
|---|---|---|
| SEQ ID | CAR6 | EIVMTQSPATLSLSPGERATLSCRASQDISKYLNWYQQKPGQAPR |
| NO: 1080 | scFv domain | LLIYHTSRLHSGIPARFSGSGSGTDYTLTISSLQPEDFAVYFCQQG |
| | | NTLPYTFGQGTKLEIKGGGGSGGGGSGGGGSGGGGSQVQLQESG |
| | | PGLVKPSETLSLTCTVSGVSLPDYGVSWIRQPPGKGLEWIGVIWG |
| | | SETTYYQSSLKSRVTISKDNSKNQVSLKLSSVTAADTAVYYCAK |
| | | HYYYGGSYAMDYWGQGTLVTVSS |
| SEQ ID | CAR6- | MALPVTALLLPLALLLHAARPEIVMTQSPATLSLSPGERATLSCR |
| NO: 1081 | Full-aa | ASQDISKYLNWYQQKPGQAPRLLIYHTSRLHSGIPARFSGSGSGT |
| | | DYTLTISSLQPEDFAVYFCQQGNTLPYTFGQGTKLEIKGGGGSGG |
| | | GGSGGGGSGGGGSQVQLQESGPGLVKPSETLSLTCTVSGVSLPD |
| | | YGVSWIRQPPGKGLEWIGVIWGSETTYYQSSLKSRVTISKDNSKN |
| | | QVSLKLSSVTAADTAVYYCAKHYYYGGSYAMDYWGQGTLVTV |
| | | SSTTTPAPRPPTPAPTIASQPLSLRPEACRPAAGGAVHTRGLDFAC |
| | | DIYIWAPLAGTCGVLLLSLVITLYCKRGRKKLLYIFKQPFMRPVQ |
| | | TTQEEDGCSCRFPEEEEGGCELRVKFSRSADAPAYKQGQNQLYN |
| | | ELNLGRREEYDVLDKRRGRDPEMGGKPRRKNPQEGLYNELQKD |
| | | KMAEAYSEIGMKGERRRGKGHDGLYQGLSTATKDTYDALHMQ |
| | | ALPPR |

Humanized CAR7

| | | |
|---|---|---|
| SEQ ID | CAR7 scFv | QVQLQESGPGLVKPSETLSLTCTVSGVSLPDYGVSWIRQPPGKGL |
| NO: 1082 | domain | EWIGVIWGSETTYYSSSLKSRVTISKDNSKNQVSLKLSSVTAADT |
| | | AVYYCAKHYYYGGSYAMDYWGQGTLVTVSSGGGGSGGGGSG |
| | | GGGSGGGGSEIVMTQSPATLSLSPGERATLSCRASQDISKYLNWY |
| | | QQKPGQAPRLLIYHTSRLHSGIPARFSGSGSGTDYTLTISSLQPEDF |
| | | AVYFCQQGNTLPYTFGQGTKLEIK |
| SEQ ID | CAR 7 Full- | MALPVTALLLPLALLLHAARPQVQLQESGPGLVKPSETLSLTCTV |
| NO: 1083 | aa | SGVSLPDYGVSWIRQPPGKGLEWIGVIWGSETTYYSSSLKSRVTIS |
| | | KDNSKNQVSLKLSSVTAADTAVYYCAKHYYYGGSYAMDYWGQ |
| | | GTLVTVSSGGGGSGGGGSGGGGSGGGGSEIVMTQSPATLSLSPG |
| | | ERATLSCRASQDISKYLNWYQQKPGQAPRLLIYHTSRLHSGIPAR |
| | | FSGSGSGTDYTLTISSLQPEDFAVYFCQQGNTLPYTFGQGTKLEIK |
| | | TTTPAPRPPTPAPTIASQPLSLRPEACRPAAGGAVHTRGLDFACDI |
| | | YIWAPLAGTCGVLLLSLVITLYCKRGRKKLLYIFKQPFMRPVQTT |
| | | QEEDGCSCRFPEEEEGGCELRVKFSRSADAPAYKQGQNQLYNEL |
| | | NLGRREEYDVLDKRRGRDPEMGGKPRRKNPQEGLYNELQKDK |
| | | MAEAYSEIGMKGERRRGKGHDGLYQGLSTATKDTYDALHMQA |
| | | LPPR |

Humanized CAR8

| | | |
|---|---|---|
| SEQ ID | CAR8 scFv | QVQLQESGPGLVKPSETLSLTCTVSGVSLPDYGVSWIRQPPGKGL |
| NO: 1084 | domain | EWIGVIWGSETTYYQSSLKSRVTISKDNSKNQVSLKLSSVTAADT |
| | | AVYYCAKHYYYGGSYAMDYWGQGTLVTVSSGGGGSGGGGSG |
| | | GGGSGGGGSEIVMTQSPATLSLSPGERATLSCRASQDISKYLNWY |
| | | QQKPGQAPRLLIYHTSRLHSGIPARFSGSGSGTDYTLTISSLQPEDF |
| | | AVYFCQQGNTLPYTFGQGTKLEIK |
| SEQ ID | CAR 8-Full- | MALPVTALLLPLALLLHAARPQVQLQESGPGLVKPSETLSLTCTV |
| NO: 1085 | aa | SGVSLPDYGVSWIRQPPGKGLEWIGVIWGSETTYYQSSLKSRVTI |
| | | SKDNSKNQVSLKLSSVTAADTAVYYCAKHYYYGGSYAMDYWG |
| | | QGTLVTVSSGGGGSGGGGSGGGGSGGGGSEIVMTQSPATLSLSP |
| | | GERATLSCRASQDISKYLNWYQQKPGQAPRLLIYHTSRLHSGIPA |
| | | RFSGSGSGTDYTLTISSLQPEDFAVYFCQQGNTLPYTFGQGTKLEI |
| | | KTTTPAPRPPTPAPTIASQPLSLRPEACRPAAGGAVHTRGLDFACD |
| | | IYIWAPLAGTCGVLLLSLVITLYCKRGRKKLLYIFKQPFMRPVQT |
| | | TQEEDGCSCRFPEEEEGGCELRVKFSRSADAPAYKQGQNQLYNE |
| | | LNLGRREEYDVLDKRRGRDPEMGGKPRRKNPQEGLYNELQKDK |
| | | MAEAYSEIGMKGERRRGKGHDGLYQGLSTATKDTYDALHMQA |
| | | LPPR |

Humanized CAR9

| | | |
|---|---|---|
| SEQ ID | CAR9 scFv | EIVMTQSPATLSLSPGERATLSCRASQDISKYLNWYQQKPGQAPR |
| NO: 1086 | domain | LLIYHTSRLHSGIPARFSGSGSGTDYTLTISSLQPEDFAVYFCQQG |
| | | NTLPYTFGQGTKLEIKGGGGSGGGGSGGGGSGGGGSQVQLQESG |
| | | PGLVKPSETLSLTCTVSGVSLPDYGVSWIRQPPGKGLEWIGVIWG |
| | | SETTYYNSSLKSRVTISKDNSKNQVSLKLSSVTAADTAVYYCAK |
| | | HYYYGGSYAMDYWGQGTLVTVSS |
| SEQ ID | CAR 9-Full- | MALPVTALLLPLALLLHAARPEIVMTQSPATLSLSPGERATLSCR |
| NO: 1087 | aa | ASQDISKYLNWYQQKPGQAPRLLIYHTSRLHSGIPARFSGSGSGT |
| | | DYTLTISSLQPEDFAVYFCQQGNTLPYTFGQGTKLEIKGGGGSGG |
| | | GGSGGGGSGGGGSQVQLQESGPGLVKPSETLSLTCTVSGVSLPD |
| | | YGVSWIRQPPGKGLEWIGVIWGSETTYYNSSLKSRVTISKDNSKN |
| | | QVSLKLSSVTAADTAVYYCAKHYYYGGSYAMDYWGQGTLVTV |
| | | SSTTTPAPRPPTPAPTIASQPLSLRPEACRPAAGGAVHTRGLDFAC |
| | | DIYIWAPLAGTCGVLLLSLVITLYCKRGRKKLLYIFKQPFMRPVQ |
| | | TTQEEDGCSCRFPEEEEGGCELRVKFSRSADAPAYKQGQNQLYN |
| | | ELNLGRREEYDVLDKRRGRDPEMGGKPRRKNPQEGLYNELQKD |
| | | KMAEAYSEIGMKGERRRGKGHDGLYQGLSTATKDTYDALHMQ |
| | | ALPPR |

Humanized CAR10

| | | |
|---|---|---|
| SEQ ID | CAR10 scFv | QVQLQESGPGLVKPSETLSLTCTVSGVSLPDYGVSWIRQPPGKGL |
| NO: 1088 | domain | EWIGVIWGSETTYYNSSLKSRVTISKDNSKNQVSLKLSSVTAADT |
| | | AVYYCAKHYYYGGSYAMDYWGQGTLVTVSSGGGGSGGGGSG |
| | | GGGSGGGGSEIVMTQSPATLSLSPGERATLSCRASQDISKYLNWY |
| | | QQKPGQAPRLLIYHTSRLHSGIPARFSGSGSGTDYTLTISSLQPEDF |
| | | AVYFCQQGNTLPYTFGQGTKLEIK |
| SEQ ID | CAR 10 Full- | MALPVTALLLPLALLLHAARPEIVMTQSPATLSLSPGERATLSCR |
| NO: 1089 | aa | ASQDISKYLNWYQQKPGQAPRLLIYHTSRLHSGIPARFSGSGSGT |
| | | DYTLTISSLQPEDFAVYFCQQGNTLPYTFGQGTKLEIKGGGGSGG |
| | | GGSGGGGSGGGGSQVQLQESGPGLVKPSETLSLTCTVSGVSLPD |
| | | YGVSWIRQPPGKGLEWIGVIWGSETTYYNSSLKSRVTISKDNSKN |
| | | QVSLKLSSVTAADTAVYYCAKHYYYGGSYAMDYWGQGTLVTV |
| | | SSTTTPAPRPPTPAPTIASQPLSLRPEACRPAAGGAVHTRGLDFAC |
| | | DIYIWAPLAGTCGVLLLSLVITLYCKRGRKKLLYIFKQPFMRPVQ |
| | | TTQEEDGCSCRFPEEEEGGCELRVKFSRSADAPAYKQGQNQLYN |
| | | ELNLGRREEYDVLDKRRGRDPEMGGKPRRKNPQEGLYNELQKD |
| | | KMAEAYSEIGMKGERRRGKGHDGLYQGLSTATKDTYDALHMQ |
| | | ALPPR |

Humanized CAR11

| | | |
|---|---|---|
| SEQ ID | CAR11 scFv | EIVMTQSPATLSLSPGERATLSCRASQDISKYLNWYQQKPGQAPR |
| NO: 1090 | domain | LLIYHTSRLHSGIPARFSGSGSGTDYTLTISSLQPEDFAVYFCQQG |
| | | NTLPYTFGQGTKLEIKGGGGSGGGGSGGGGSQVQLQESGPGLVK |
| | | PSETLSLTCTVSGVSLPDYGVSWIRQPPGKGLEWIGVIWGSETTY |
| | | YNSSLKSRVTISKDNSKNQVSLKLSSVTAADTAVYYCAKHYYYG |
| | | GSYAMDYWGQGTLVTVSS |
| SEQ ID | CAR 11 Full- | MALPVTALLLPLALLLHAARPQVQLQESGPGLVKPSETLSLTCTV |
| NO: 1091 | aa | SGVSLPDYGVSWIRQPPGKGLEWIGVIWGSETTYYNSSLKSRVTI |
| | | SKDNSKNQVSLKLSSVTAADTAVYYCAKHYYYGGSYAMDYWG |
| | | QGTLVTVSSGGGGSGGGGSGGGGSGGGGSEIVMTQSPATLSLSP |
| | | GERATLSCRASQDISKYLNWYQQKPGQAPRLLIYHTSRLHSGIPA |
| | | RFSGSGSGTDYTLTISSLQPEDFAVYFCQQGNTLPYTFGQGTKLEI |
| | | KTTTPAPRPPTPAPTIASQPLSLRPEACRPAAGGAVHTRGLDFACD |
| | | IYIWAPLAGTCGVLLLSLVITLYCKRGRKKLLYIFKQPFMRPVQT |
| | | TQEEDGCSCRFPEEEEGGCELRVKFSRSADAPAYKQGQNQLYNE |
| | | LNLGRREEYDVLDKRRGRDPEMGGKPRRKNPQEGLYNELQKDK |
| | | MAEAYSEIGMKGERRRGKGHDGLYQGLSTATKDTYDALHMQA |
| | | LPPR |

Humanized CAR12

| | | |
|---|---|---|
| SEQ ID | CAR12 | QVQLQESGPGLVKPSETLSLTCTVSGVSLPDYGVSWIRQPPGKGL |
| NO: 1092 | scFv domain | EWIGVIWGSETTYYNSSLKSRVTISKDNSKNQVSLKLSSVTAADT |
| | | AVYYCAKHYYYGGSYAMDYWGQGTLVTVSSGGGGSGGGGSG |
| | | GGGSEIVMTQSPATLSLSPGERATLSCRASQDISKYLNWYQQKPG |
| | | QAPRLLIYHTSRLHSGIPARFSGSGSGTDYTLTISSLQPEDFAVYFC |
| | | QQGNTLPYTFGQGTKLEIK |
| SEQ ID | CAR 12- | MALPVTALLLPLALLLHAARPEIVMTQSPATLSLSPGERATLSCR |
| NO: 1093 | Full-aa | ASQDISKYLNWYQQKPGQAPRLLIYHTSRLHSGIPARFSGSGSGT |
| | | DYTLTISSLQPEDFAVYFCQQGNTLPYTFGQGTKLEIKGGGGSGG |
| | | GGSGGGGSQVQLQESGPGLVKPSETLSLTCTVSGVSLPDYGVSWI |
| | | RQPPGKGLEWIGVIWGSETTYYNSSLKSRVTISKDNSKNQVSLKL |
| | | SSVTAADTAVYYCAKHYYYGGSYAMDYWGQGTLVTVSSTTTP |
| | | APRPPTPAPTIASQPLSLRPEACRPAAGGAVHTRGLDFACDIYIWA |
| | | PLAGTCGVLLLSLVITLYCKRGRKKLLYIFKQPFMRPVQTTQEED |
| | | GCSCRFPEEEEGGCELRVKFSRSADAPAYKQGQNQLYNELNLGR |
| | | REEYDVLDKRRGRDPEMGGKPRRKNPQEGLYNELQKDKMAEA |
| | | YSEIGMKGERRRGKGHDGLYQGLSTATKDTYDALHMQALPPR |

CAR A

| | | |
|---|---|---|
| SEQ ID | CAR A- | atgcttctcctggtgacaagccttctgctctgtgagttaccacacccagcatt |
| NO: 3215 | with leader | cctcctgatcccagacatccagatgacacagactacatcctccctgtctgcct |
| | Full-nt; | ctctgggagacagagtcaccatcagttgcagggcaagtcaggacattagtaaa |
| | | tatttaaattggtatcagcagaaaccagatggaactgttaaactcctgatcta |
| | | ccatacatcaagattacactcaggagtcccatcaaggttcagtggcagtgggt |
| | | ctggaacagattattctctcaccattagcaacctggagcaagaagatattgcc |
| | | acttacttttgccaacagggtaatacgcttccgtacacgttcggaggggggac |
| | | taagttggaaataacaggctccacctctggatccggcaagcccggatctggcg |
| | | agggatccaccaagggcgaggtgaaactgcaggagtcaggacctggcctggtg |
| | | gcgccctcacagagcctgtccgtcacatgcactgtctcaggggtctcattacc |
| | | cgactatggtgtaagctggattcgccagcctccacgaaagggtctggagtggc |
| | | tgggagtaatatggggtagtgaaaccacatactataattcagctctcaaatcc |
| | | agactgaccatcatcaaggacaactccaagagccaagttttcttaaaaatgaa |
| | | cagtctgcaaactgatgacacagccatttactactgtgccaaacattattact |
| | | acggtggtagctatgctatggactactggggtcaaggaacctcagtcaccgtc |
| | | tcctcagcggccgcaattgaagttatgtatcctcctccttacctagacaatga |
| | | gaagagcaatggaaccattatccatgtgaaagggaaacacctttgtccaagtc |
| | | ccctatttcccggaccttctaagcccttttgggtgctggtggtggttggggga |
| | | gtcctggcttgctatagcttgctagtaacagtggcctttattattttctgggt |
| | | gaggagtaagaggagcaggctcctgcacagtgactacatgaacatgactcccc |
| | | gccgccccgggcccacccgcaagcattaccagccctatgccccaccacgcgac |
| | | ttcgcagcctatcgctccagagtgaagttcagcaggagcgcagacgcccccgc |
| | | gtaccagcagggccagaaccagctctataacgagctcaatctaggacgaagag |
| | | aggagtacgatgttttggacaagagacgtggccgggaccctgagatgggggga |
| | | aagccgagaaggaagaaccctcaggaaggcctgtacaatgaactgcagaaaga |
| | | taagatggcggaggcctacagtgagattgggatgaaaggcgagcgccggaggg |
| | | gcaaggggcacgatggcctttaccagggtctcagtacagccaccaaggacacc |
| | | tacgacgcccttcacatgcaggccctgccccctcgc |
| SEQ ID | CAR A-full | MLLLVTSLLLCELPHPAFLLIPDIQMTQTTSSLSASLGDRVTISCRASQDISK |
| NO: 3216 | amino acid | YLNWYQQKPDGTVKLLIYHTSRLHSGVPSRFSGSGSGTDYSLTISNLEQEDIA |
| | transgene | TYFCQQGNTLPYTFGGGTKLEITGSTSGSGKPGSGEGSTKGEVKLQESGPGLV |
| | sequence; | APSQSLSVTCTVSGVSLPDYGVSWIRQPPRKGLEWLGVIWGSETTYYNSALKS |
| | with leader | RLTIIKDNSKSQVFLKMNSLQTDDTAIYYCAKHYYYGGSYAMDYWGQGTSVTV |
| | underlined | SSAAAIEVMYPPPYLDNEKSNGTIIHVKGKHLCPSPLFPGPSKPFWVLVVVGG |
| | | VLACYSLLVTVAFIIFWVRSKRSRLLHSDYMNMTPRRPGPTRKHYQPYAPPRD |
| | | FAAYRSRVKFSRSADAPAYQQGQNQLYNELNLGRREEYDVLDKRRGRDPEMGG |
| | | KPRRKNPQEGLYNELQKDKMAEAYSEIGMKGERRRGKGHDGLYQGLSTATKDT |
| | | YDALHMQALPPR |
| SEQ ID | CAR A- | atgcttctcctggtgacaagccttctgctctgtgagttaccacacccagcatt |
| NO: 3217 | CD19 scFv | cctcctgatcccagacatccagatgacacagactacatcctccctgtctgcct |
| | nucleotide | ctctgggagacagagtcaccatcagttgcagggcaagtcaggacattagtaaa |
| | sequence | tatttaaattggtatcagcagaaaccagatggaactgttaaactcctgatcta |
| | with leader | ccatacatcaagattacactcaggagtcccatcaaggttcagtggcagtgggt |
| | underlined | ctggaacagattattctctcaccattagcaacctggagcaagaagatattgcc |
| | | acttacttttgccaacagggtaatacgcttccgtacacgttcggagggggga |
| | | taagttggaaataacaggctccacctctggatccggcaagcccggatctggcg |
| | | agggatccaccaagggcgaggtgaaactgcaggagtcaggacctggcctggtg |
| | | gcgccctcacagagcctgtccgtcacatgcactgtctcaggggtctcattacc |
| | | cgactatggtgtaagctggattcgccagcctccacgaaagggtctggagtgg |
| | | tgggagtaatatggggtagtgaaaccacatactataattcagctctcaaatcc |
| | | agactgaccatcatcaaggacaactccaagagccaagttttcttaaaaatgaa |
| | | cagtctgcaaactgatgacacagccatttactactgtgccaaacattattact |
| | | acggtggtagctatgctatggactactggggtcaaggaacctcagtcaccgtc |
| | | tcctca |
| SEQ ID | CAR A- | MLLLVTSLLLCELPHPAFLLIPDIQMTQTTSSLSASLGDRVTISCRASQDISK |
| NO: 3218 | CD19 scFv | YLNWYQQKPDGTVKLLIYHTSRLHSGVPSRFSGSGSGTDYSLTISNLEQEDIA |
| | amino acid | TYFCQQGNTLPYTFGGGTKLEITGSTSGSGKPGSGEGSTKGEVKLQESGPGLV |
| | sequence; | APSQSLSVTCTVSGVSLPDYGVSWIRQPPRKGLEWLGVIWGSETTYYNSALKS |
| | with leader | RLTIIKDNSKSQVFLKMNSLQTDDTAIYYCAKHYYYGGSYAMDYWGQGTSVTV |
| | underlined | S |
| SEQ ID | CAR A-full | gacatccagatgacacagactacatcctccctgtctgcctctctgggagacag |
| NO: 3219 | nucleotide | agtcaccatcagttgcagggcaagtcaggacattagtaaatatttaaattggt |
| | sequence; no | atcagcagaaaccagatggaactgttaaactcctgatctaccatacatcaaga |
| | leader | ttacactcaggagtcccatcaaggttcagtggcagtgggtctggaacagatta |
| | | ttctctcaccattagcaacctggagcaagaagatattgccacttacttttgcc |
| | | aacagggtaatacgcttccgtacacgttcggaggggggactaagttggaaata |
| | | acaggctccacctctggatccggcaagcccggatctggcgagggatccaccaa |
| | | gggcgaggtgaaactgcaggagtcaggacctggcctggtggcgccctcacaga |
| | | gcctgtccgtcacatgcactgtctcaggggtctcattacccgactatggtgta |
| | | agctggattcgccagcctccacgaaagggtctggagtggctgggagtaatatg |
| | | gggtagtgaaaccacatactataattcagctctcaaatccagactgaccatca |
| | | tcaaggacaactccaagagccaagttttcttaaaaatgaacagtctgcaaact |
| | | gatgacacagccatttactactgtgccaaacattattactacggtggtagcta |
| | | tgctatggactactggggtcaaggaacctcagtcaccgtctcctcagcggccg |
| | | caattgaagttatgtatcctcctccttacctagacaatgagaagagcaatgga |
| | | accattatccatgtgaaagggaaacacctttgtccaagtcccctatttcccgg |
| | | accttctaagcccttttgggtgctggtggtggttgggggagtcctggcttgct |
| | | atagcttgctagtaacagtggcctttattattttctgggtgaggagtaagagg |
| | | agcaggctcctgcacagtgactacatgaacatgactccccgccgccccgggcc |
| | | cacccgcaagcattaccagccctatgccccaccacgcgacttcgcagcctatc |
| | | gctccagagtgaagttcagcaggagcgcagacgcccccgcgtaccagcagggc |
| | | cagaaccagctctataacgagctcaatctaggacgaagagaggagtacgatgt |
| | | tttggacaagagacgtggccgggaccctgagatggggggaaagccgagaagga |
| | | agaaccctcaggaaggcctgtacaatgaactgcagaaagataagatggcggag |
| | | gcctacagtgagattgggatgaaaggcgagcgccggaggggcaaggggcacga |
| | | tggcctttaccagggtctcagtacagccaccaaggacacctacgacgcccttc |
| | | acatgcaggccctgccccctcgc |
| SEQ ID | CAR A-full | DIQMTQTTSSLSASLGDRVTISCRASQDISKYLNWYQQKPDGTVKLLIYHTSR |
| NO: 1064 | amino acid | LHSGVPSRFSGSGSGTDYSLTISNLEQEDIATYFCQQGNTLPYTFGGGTKLEI |
| | transgene | TGSTSGSGKPGSGEGSTKGEVKLQESGPGLVAPSQSLSVTCTVSGVSLPDYGV |
| | sequence; no | SWIRQPPRKGLEWLGVIWGSETTYYNSALKSRLTIIKDNSKSQVFLKMNSLQT |
| | leader | DDTAIYYCAKHYYYGGSYAMDYWGQGTSVTVSSAAAIEVMYPPPYLDNEKSNG |
| | | TIIHVKGKHLCPSPLFPGPSKPFWVLVVVGGVLACYSLLVTVAFIIFWVRSKR |
| | | SRLLHSDYMNMTPRRPGPTRKHYQPYAPPRDFAAYRSRVKFSRSADAPAYQQG |
| | | QNQLYNELNLGRREEYDVLDKRRGRDPEMGGKPRRKNPQEGLYNELQKDKMAE |
| | | AYSEIGMKGERRRGKGHDGLYQGLSTATKDTYDALHMQALPPR |
| SEQ ID | CAR A- | gacatccagatgacacagactacatcctccctgtctgcctctctgggagacag |
| NO: 3220 | CD19 scFv | agtcaccatcagttgcagggcaagtcaggacattagtaaatatttaaattggt |
| | nucleotide; | atcagcagaaaccagatggaactgttaaactcctgatctaccatacatcaaga |
| | no leader | ttacactcaggagtcccatcaaggttcagtggcagtgggtctggaacagatta |
| | | ttctctcaccattagcaacctggagcaagaagatattgccacttacttttgcc |
| | | aacagggtaatacgcttccgtacacgttcggaggggggactaagttggaaata |
| | | acaggctccacctctggatccggcaagcccggatctggcgagggatccaccaa |
| | | gggcgaggtgaaactgcaggagtcaggacctggcctggtggcgccctcacaga |
| | | gcctgtccgtcacatgcactgtctcaggggtctcattacccgactatggtgta |
| | | agctggattcgccagcctccacgaaagggtctggagtggctgggagtaatatg |
| | | gggtagtgaaaccacatactataattcagctctcaaatccagactgaccatca |
| | | tcaaggacaactccaagagccaagttttcttaaaaatgaacagtctgcaaact |
| | | gatgacacagccatttactactgtgccaaacattattactacggtggtagcta |
| | | tgctatggactactggggtcaaggaacctcagtcaccgtctcctca |
| SEQ ID | CAR A- | DIQMTQTTSSLSASLGDRVTISCRASQDISKYLNWYQQKPDGTVKLLIYHTSR |
| NO: 1063 | CD19 scFv | LHSGVPSRFSGSGSGTDYSLTISNLEQEDIATYFCQQGNTLPYTFGGGTKLEI |
| | amino acid | TGSTSGSGKPGSGEGSTKGEVKLQESGPGLVAPSQSLSVTCTVSGVSLPDYGV |
| | sequence; no | SWIRQPPRKGLEWLGVIWGSETTYYNSALKSRLTIIKDNSKSQVFLKMNSLQT |
| | leader | DDTAIYYCAKHYYYGGSYAMDYWGQGTSVTVSS |

CAR B

| | | |
|---|---|---|
| SEQ ID | CAR B-full | ATGCTGCTGCTGGTGACCAGCCTGCTGCTGTGCGAGCTGCCCCACCCCGCCTT |
| NO: 3221 | sequence; | TCTGCTGATCCCCGACATCCAGATGACCCAGACCACCTCCAGCCTGAGCGCCA |
| | with leader | GCCTGGGCGACCGGGTGACCATCAGCTGCCGGGCCAGCCAGGACATCAGCAAG |
| | underlined | TACCTGAACTGGTATCAGCAGAAGCCCGACGGCACCGTCAAGCTGCTGATCTA |
| | nucleotide | CCACACCAGCCGGCTGCACAGCGGCGTGCCCAGCCGGTTTAGCGGCAGCGGCT |
| | | CCGGCACCGACTACAGCCTGACCATCTCCAACCTGGAACAGGAAGATATCGCC |
| | | ACCTACTTTTGCCAGCAGGGCAACACACTGCCCTACACCTTTGGCGGCGGAAC |
| | | AAAGCTGGAAATCACCGGCAGCACCTCCGGCAGCGGCAAGCCTGGCAGCGGCG |
| | | AGGGCAGCACCAAGGGCGAGGTGAAGCTGCAGGAAAGCGGCCCTGGCCTGGTG |
| | | GCCCCCAGCCAGAGCCTGAGCGTGACCTGCACCGTGAGCGGCGTGAGCCTGCC |
| | | CGACTACGGCGTGAGCTGGATCCGGCAGCCCCCCAGGAAGGGCCTGGAATGGC |
| | | TGGGCGTGATCTGGGGCAGCGAGACCACCTACTACAACAGCGCCCTGAAGAGC |
| | | CGGCTGACCATCATCAAGGACAACAGCAAGAGCCAGGTGTTCCTGAAGATGAA |
| | | CAGCCTGCAGACCGACGACACCGCCATCTACTACTGCGCCAAGCACTACTACT |
| | | ACGGCGGCAGCTACGCCATGGACTACTGGGGCCAGGGCACCAGCGTGACCGTG |
| | | AGCAGCGAATCTAAGTACGGACCGCCCTGCCCCCCTTGCCCTATGTTCTGGGT |
| | | GCTGGTGGTGGTCGGAGGCGTGCTGGCCTGCTACAGCCTGCTGGTCACCGTGG |
| | | CCTTCATCATCTTTTGGGTGAAACGGGGCAGAAAGAAACTCCTGTATATATTC |
| | | AAACAACCATTTATGAGACCAGTACAAACTACTCAAGAGGAAGATGGCTGTAG |
| | | CTGCCGATTTCCAGAAGAAGAAGAAGGAGGATGTGAACTGCGGGTGAAGTTCA |
| | | GCAGAAGCGCCGACGCCCCTGCCTACCAGCAGGGCCAGAATCAGCTGTACAAC |
| | | GAGCTGAACCTGGGCAGAAGGGAAGAGTACGACGTCCTGGATAAGCGGAGAGG |
| | | CCGGGACCCTGAGATGGGCGGCAAGCCTCGGCGGAAGAACCCCCAGGAAGGCC |
| | | TGTATAACGAACTGCAGAAAGACAAGATGGCCGAGGCCTACAGCGAGATCGGC |
| | | ATGAAGGGCGAGCGGAGGCGGGGCAAGGGCCACGACGGCCTGTATCAGGGCCT |
| | | GTCCACCGCCACCAAGGATACCTACGACGCCCTGCACATGCAGGCCCTGCCCC |
| | | CAAGG |
| SEQ ID | CAR B-full | MLLLVTSLLLCELPHPAFLLIPDIQMTQTTSSLSASLGDRVTISCRASQDISK |
| NO: 3222 | transgene | YLNWYQQKPDGTVKLLIYHTSRLHSGVPSRFSGSGSGTDYSLTISNLEQEDIA |
| | amino acid | TYFCQQGNTLPYTFGGGTKLEITGSTSGSGKPGSGEGSTKGEVKLQESGPGLV |
| | sequence; | APSQSLSVTCTVSGVSLPDYGVSWIRQPPRKGLEWLGVIWGSETTYYNSALKS |
| | with leader | RLTIIKDNSKSQVFLKMNSLQTDDTAIYYCAKHYYYGGSYAMDYWGQGTSVTV |
| | underlined | SSESKYGPPCPPCPMFWVLVVVGGVLACYSLLVTVAFIIFWVKRGRKKLLYIF |
| | | KQPFMRPVQTTQEEDGCSCRFPEEEEGGCELRVKFSRSADAPAYQQGQNQLYN |
| | | ELNLGRREEYDVLDKRRGRDPEMGGKPRRKNPQEGLYNELQKDKMAEAYSEIG |
| | | [sequence omitted] |
| SEQ ID | CAR B- | ATGCTGCTGCTGGTGACCAGCCTGCTGCTGTGCGAGCTGCCCCACCCCGCCTT |
| NO: 3223 | sequence; | TCTGCTGATCCCCGACATCCAGATGACCCAGACCACCTCCAGCCTGAGCGCCA |
| | with leader | GCCTGGGCGACCGGGTGACCATCAGCTGCCGGGCCAGCCAGGACATCAGCAAG |
| | underlined | TACCTGAACTGGTATCAGCAGAAGCCCGACGGCACCGTCAAGCTGCTGATCTA |
| | CD19 scFv | CCACACCAGCCGGCTGCACAGCGGCGTGCCCAGCCGGTTTAGCGGCAGCGGCT |
| | nucleotide | CCGGCACCGACTACAGCCTGACCATCTCCAACCTGGAACAGGAAGATATCGCC |
| | | ACCTACTTTTGCCAGCAGGGCAACACACTGCCCTACACCTTTGGCGGCGGAAC |
| | | AAAGCTGGAAATCACCGGCAGCACCTCCGGCAGCGGCAAGCCTGGCAGCGGCG |
| | | AGGGCAGCACCAAGGGCGAGGTGAAGCTGCAGGAAAGCGGCCCTGGCCTGGTG |
| | | GCCCCCAGCCAGAGCCTGAGCGTGACCTGCACCGTGAGCGGCGTGAGCCTGCC |
| | | CGACTACGGCGTGAGCTGGATCCGGCAGCCCCCCAGGAAGGGCCTGGAATGGC |
| | | TGGGCGTGATCTGGGGCAGCGAGACCACCTACTACAACAGCGCCCTGAAGAGC |
| | | CGGCTGACCATCATCAAGGACAACAGCAAGAGCCAGGTGTTCCTGAAGATGAA |
| | | CAGCCTGCAGACCGACGACACCGCCATCTACTACTGCGCCAAGCACTACTACT |
| | | ACGGCGGCAGCTACGCCATGGACTACTGGGGCCAGGGCACCAGCGTGACCGTG |
| | | AGCAGC |
| SEQ ID | CAR B- | MLLLVTSLLLCELPHPAFLLIPDIQMTQTTSSLSASLGDRVTISCRASQDISK |
| NO: 3224 | amino acid | YLNWYQQKPDGTVKLLIYHTSRLHSGVPSRFSGSGSGTDYSLTISNLEQEDIA |
| | sequence; | TYFCQQGNTLPYTFGGGTKLEITGSTSGSGKPGSGEGSTKGEVKLQESGPGLV |
| | with leader | APSQSLSVTCTVSGVSLPDYGVSWIRQPPRKGLEWLGVIWGSETTYYNSALKS |
| | underlined | RLTIIKDNSKSQVFLKMNSLQTDDTAIYYCAKHYYYGGSYAMDYWGQGTSVTV |
| | CD19 scFv | SS |
| SEQ ID | CAR B-full | GACATCCAGATGACCCAGACCACCTCCAGCCTGAGCGCCAGCCTGGGCGACCG |
| NO: 3225 | nucleotide | GGTGACCATCAGCTGCCGGGCCAGCCAGGACATCAGCAAGTACCTGAACTGGT |
| | sequence; no | ATCAGCAGAAGCCCGACGGCACCGTCAAGCTGCTGATCTACCACACCAGCCGG |
| | leader | CTGCACAGCGGCGTGCCCAGCCGGTTTAGCGGCAGCGGCTCCGGCACCGACTA |
| | | CAGCCTGACCATCTCCAACCTGGAACAGGAAGATATCGCCACCTACTTTTGCC |
| | | AGCAGGGCAACACACTGCCCTACACCTTTGGCGGCGGAACAAAGCTGGAAATC |
| | | ACCGGCAGCACCTCCGGCAGCGGCAAGCCTGGCAGCGGCGAGGGCAGCACCAA |
| | | GGGCGAGGTGAAGCTGCAGGAAAGCGGCCCTGGCCTGGTGGCCCCCAGCCAGA |
| | | GCCTGAGCGTGACCTGCACCGTGAGCGGCGTGAGCCTGCCCGACTACGGCGTG |
| | | AGCTGGATCCGGCAGCCCCCCAGGAAGGGCCTGGAATGGCTGGGCGTGATCTG |
| | | GGGCAGCGAGACCACCTACTACAACAGCGCCCTGAAGAGCCGGCTGACCATCA |
| | | TCAAGGACAACAGCAAGAGCCAGGTGTTCCTGAAGATGAACAGCCTGCAGACC |
| | | GACGACACCGCCATCTACTACTGCGCCAAGCACTACTACTACGGCGGCAGCTA |
| | | CGCCATGGACTACTGGGGCCAGGGCACCAGCGTGACCGTGAGCAGCGAATCTA |
| | | AGTACGGACCGCCCTGCCCCCCTTGCCCTATGTTCTGGGTGCTGGTGGTGGTC |
| | | GGAGGCGTGCTGGCCTGCTACAGCCTGCTGGTCACCGTGGCCTTCATCATCTT |
| | | TTGGGTGAAACGGGGCAGAAAGAAACTCCTGTATATATTCAAACAACCATTTA |
| | | TGAGACCAGTACAAACTACTCAAGAGGAAGATGGCTGTAGCTGCCGATTTCCA |
| | | GAAGAAGAAGAAGGAGGATGTGAACTGCGGGTGAAGTTCAGCAGAAGCGCCGA |
| | | CGCCCCTGCCTACCAGCAGGGCCAGAATCAGCTGTACAACGAGCTGAACCTGG |
| | | GCAGAAGGGAAGAGTACGACGTCCTGGATAAGCGGAGAGGCCGGGACCCTGAG |
| | | ATGGGCGGCAAGCCTCGGCGGAAGAACCCCCAGGAAGGCCTGTATAACGAACT |
| | | GCAGAAAGACAAGATGGCCGAGGCCTACAGCGAGATCGGCATGAAGGGCGAGC |
| | | GGAGGCGGGGCAAGGGCCACGACGGCCTGTATCAGGGCCTGTCCACCGCCACC |
| | | AAGGATACCTACGACGCCCTGCACATGCAGGCCCTGCCCCCAAGG |
| SEQ ID | CAR B-full | DIQMTQTTSSLSASLGDRVTISCRASQDISKYLNWYQQKPDGTVKLLIYHTSR |
| NO: 3226 | amino acid | LHSGVPSRFSGSGSGTDYSLTISNLEQEDIATYFCQQGNTLPYTFGGGTKLEI |
| | transgene | TGSTSGSGKPGSGEGSTKGEVKLQESGPGLVAPSQSLSVTCTVSGVSLPDYGV |
| | sequence; no | SWIRQPPRKGLEWLGVIWGSETTYYNSALKSRLTIIKDNSKSQVFLKMNSLQT |
| | leader | DDTAIYYCAKHYYYGGSYAMDYWGQGTSVTVSSESKYGPPCPPCPMFWVLVVV |
| | | GGVLACYSLLVTVAFIIFWVKRGRKKLLYIFKQPFMRPVQTTQEEDGCSCRFP |
| | | EEEEGGCELRVKFSRSADAPAYQQGQNQLYNELNLGRREEYDVLDKRRGRDPE |
| | | MGGKPRRKNPQEGLYNELQKDKMAEAYSEIGMKGERRRGKGHDGLYQGLSTAT |
| | | KDTYDALHMQALPPR |
| SEQ ID | CAR B- | GACATCCAGATGACCCAGACCACCTCCAGCCTGAGCGCCAGCCTGGGCGACCG |
| NO: 3227 | CD19 scFv | GGTGACCATCAGCTGCCGGGCCAGCCAGGACATCAGCAAGTACCTGAACTGGT |
| | sequence; no | ATCAGCAGAAGCCCGACGGCACCGTCAAGCTGCTGATCTACCACACCAGCCGG |
| | leader | CTGCACAGCGGCGTGCCCAGCCGGTTTAGCGGCAGCGGCTCCGGCACCGACTA |
| | | CAGCCTGACCATCTCCAACCTGGAACAGGAAGATATCGCCACCTACTTTTGCC |
| | | AGCAGGGCAACACACTGCCCTACACCTTTGGCGGCGGAACAAAGCTGGAAATC |
| | | ACCGGCAGCACCTCCGGCAGCGGCAAGCCTGGCAGCGGCGAGGGCAGCACCAA |
| | | GGGCGAGGTGAAGCTGCAGGAAAGCGGCCCTGGCCTGGTGGCCCCCAGCCAGA |
| | | GCCTGAGCGTGACCTGCACCGTGAGCGGCGTGAGCCTGCCCGACTACGGCGTG |
| | | AGCTGGATCCGGCAGCCCCCCAGGAAGGGCCTGGAATGGCTGGGCGTGATCTG |
| | | GGGCAGCGAGACCACCTACTACAACAGCGCCCTGAAGAGCCGGCTGACCATCA |
| | | TCAAGGACAACAGCAAGAGCCAGGTGTTCCTGAAGATGAACAGCCTGCAGACC |
| | | GACGACACCGCCATCTACTACTGCGCCAAGCACTACTACTACGGCGGCAGCTA |
| | | CGCCATGGACTACTGGGGCCAGGGCACCAGCGTGACCGTGAGCAGC |
| SEQ ID | CAR B- | DIQMTQTTSSLSASLGDRVTISCRASQDISKYLNWYQQKPDGTVKLLIYHTSR |
| NO: 1063 | CD19 scFv | LHSGVPSRFSGSGSGTDYSLTISNLEQEDIATYFCQQGNTLPYTFGGGTKLEI |
| | sequence; no | TGSTSGSGKPGSGEGSTKGEVKLQESGPGLVAPSQSLSVTCTVSGVSLPDYGV |
| | leader | SWIRQPPRKGLEWLGVIWGSETTYYNSALKSRLTIIKDNSKSQVFLKMNSLQT |
| | | DDTAIYYCAKHYYYGGSYAMDYWGQGTSVTVSS |

Murine CART19

| | | |
|---|---|---|
| SEQ ID | HCDR1 | DYGVS |
| NO: 1094 | (Kabat) | |
| SEQ ID | HCDR2 | VIWGSETTYYNSALKS |
| NO: 1095 | (Kabat) | |
| SEQ ID | HCDR3 | HYYYGGSYAMDY |
| NO: 1096 | (Kabat) | |
| SEQ ID | LCDR1 | RASQDISKYLN |
| NO: 1097 | (Kabat) | |
| SEQ ID | LCDR2 | HTSRLHS |
| NO: 1098 | (Kabat) | |
| SEQ ID | LCDR3 | QQGNTLPYT |
| NO: 1099 | (Kabat) | |

Humanized CART19 a

| | | |
|---|---|---|
| SEQ ID | HCDR1 | DYGVS |
| NO: 1100 | (Kabat) | |
| SEQ ID | HCDR2 | VIWGSETTYYSSSLKS |
| NO: 1101 | (Kabat) | |
| SEQ ID | HCDR3 | HYYYGGSYAMDY |
| NO: 1102 | (Kabat) | |
| SEQ ID | LCDR1 | RASQDISKYLN |
| NO: 1103 | (Kabat) | |
| SEQ ID | LCDR2 | HTSRLHS |
| NO: 1104 | (Kabat) | |
| SEQ ID | LCDR3 | QQGNTLPYT |
| NO: 1105 | (Kabat) | |

Humanized CART19 b

| | | |
|---|---|---|
| SEQ ID | HCDR1 | DYGVS |
| NO: 1106 | (Kabat) | |
| SEQ ID | HCDR2 | VIWGSETTYYQSSLKS |
| NO: 1107 | (Kabat) | |
| SEQ ID | HCDR3 | HYYYGGSYAMDY |
| NO: 1108 | (Kabat) | |
| SEQ ID | LCDR1 | RASQDISKYLN |
| NO: 1109 | (Kabat) | |
| SEQ ID | LCDR2 | HTSRLHS |
| NO: 1110 | (Kabat) | |
| SEQ ID | LCDR3 | QQGNTLPYT |
| NO: 1111 | (Kabat) | |

Humanized CART19 c

| | | |
|---|---|---|
| SEQ ID | HCDR1 | DYGVS |
| NO: 1112 | (Kabat) | |
| SEQ ID | HCDR2 | VIWGSETTYYNSSLKS |
| NO: 1113 | (Kabat) | |
| SEQ ID | HCDR3 | HYYYGGSYAMDY |
| NO: 1114 | (Kabat) | |
| SEQ ID | LCDR1 | RASQDISKYLN |
| NO: 1115 | (Kabat) | |
| SEQ ID | LCDR2 | HTSRLHS |
| NO: 1116 | (Kabat) | |
| SEQ ID | LCDR3 | QQGNTLPYT |
| NO: 1117 | (Kabat) | |

[0488] CD19 CAR constructs containing humanized anti-CD19 scFv domains are described in PCT publication WO 2014/153270, incorporated herein by reference.

[0489] The sequences of murine and humanized CDR sequences of the anti-CD19 scFv domains are shown in Table 4 for the heavy chain variable domains and in Table 5 for the light chain variable domains. The SEQ ID NOs refer to those found in Table 3.

TABLE 4
Exemplary Heavy Chain Variable Domain CDR
(Kabat) SEQ ID NO's of CD19 Antibodies

| Candidate | HCDR1 | HCDR2 | HCDR3 |
|---|---|---|---|
| murine_CART19 | SEQ ID NO: 1094 | SEQ ID NO: 1095 | SEQ ID NO: 1096 |
| humanized_CART19 a | SEQ ID NO: 1100 | SEQ ID NO: 1101 | SEQ ID NO: 1102 |
| humanized_CART19 b | SEQ ID NO: 1106 | SEQ ID NO: 1107 | SEQ ID NO: 1108 |
| humanized_CART19 c | SEQ ID NO: 1112 | SEQ ID NO: 1113 | SEQ ID NO: 1114 |

TABLE 5
Exemplary Light Chain Variable Domain CDR
(Kabat) SEQ ID NO's of CD19 Antibodies

| Candidate | LCDR1 | LCDR2 | LCDR3 |
|---|---|---|---|
| murine_CART19 | SEQ ID NO: 1097 | SEQ ID NO: 1098 | SEQ ID NO: 1099 |
| humanized_CART19 a | SEQ ID NO: 1103 | SEQ ID NO: 1104 | SEQ ID NO: 1105 |
| humanized_CART19 b | SEQ ID NO: 1109 | SEQ ID NO: 1110 | SEQ ID NO: 1111 |
| humanized_CART19 c | SEQ ID NO: 1115 | SEQ ID NO: 1116 | SEQ ID NO: 1117 |

[0490] Any known CD19 CAR, e.g., the CD19 antigen-binding domain of any known CD19 CAR, in the art can be used in accordance with the present disclosure. For example, LG-740; CD19 CAR described in the U.S. Pat. Nos. 8,399,645; 7,446,190; Xu et al., Leuk Lymphoma. 2013 54(2):255-260(2012); Cruz et al., Blood 122(17):2965-2973 (2013); Brentjens et al., Blood, 118(18):4817-4828 (2011); Kochenderfer et al., Blood 116(20):4099-102 (2010); Kochenderfer et al., Blood 122 (25):4129-39(2013); and 16th Annu Meet Am Soc Gen Cell Ther (ASGCT) (May 15-18, Salt Lake City) 2013, Abst 10.

[0491] Exemplary CD19 CARs include CD19 CARs described herein, e.g., in one or more tables described herein, or an anti-CD19 CAR described in Xu et al. Blood 123.24(2014):3750-9; Kochenderfer et al. Blood 122.25(2013):4129-39, Cruz et al. Blood 122.17(2013):2965-73, NCT00586391, NCT01087294, NCT02456350, NCT00840853, NCT02659943, NCT02650999, NCT02640209, NCT01747486, NCT02546739, NCT02656147, NCT02772198, NCT00709033, NCT02081937, NCT00924326, NCT02735083, NCT02794246, NCT02746952, NCT01593696, NCT02134262, NCT01853631, NCT02443831, NCT02277522, NCT02348216, NCT02614066, NCT02030834, NCT02624258, NCT02625480, NCT02030847, NCT02644655, NCT02349698, NCT02813837, NCT02050347, NCT01683279, NCT02529813, NCT02537977, NCT02799550, NCT02672501, NCT02819583, NCT02028455, NCT01840566, NCT01318317, NCT01864889, NCT02706405, NCT01475058, NCT01430390, NCT02146924, NCT02051257, NCT02431988, NCT01815749, NCT02153580, NCT01865617, NCT02208362, NCT02685670, NCT02535364, NCT02631044, NCT02728882, NCT02735291, NCT01860937, NCT02822326, NCT02737085, NCT02465983, NCT02132624, NCT02782351, NCT01493453, NCT02652910, NCT02247609, NCT01029366, NCT01626495, NCT02721407, NCT01044069, NCT00422383, NCT01680991, NCT02794961, or NCT02456207, each of which is incorporated herein by reference in its entirety.

### BCMA CAR and BCMA-Binding Sequences

[0492] In some embodiments, the CAR or CAR-expressing cell described herein is a BCMA CAR-expressing cell (e.g., a cell expressing a CAR molecule that binds to human BCMA). Exemplary BCMA CAR molecules can include sequences disclosed in Table 1 or 16 of WO2016/014565, incorporated herein by reference. The BCMA CAR construct can include an optional leader sequence; an optional hinge domain, e.g., a CD8 hinge domain; a transmembrane domain, e.g., a CD8 transmembrane domain; an intracellular domain, e.g., a 4-1BB intracellular domain; and a functional signaling domain, e.g., a CD3 zeta domain. In some embodiments, the domains are contiguous and in the same reading frame to form a single fusion protein. In other embodiments, the domain are in separate polypeptides, e.g., as in an RCAR molecule as described herein.

[0493] The sequences of exemplary BCMA CAR molecules or fragments thereof are disclosed in Tables 6-8. In some embodiments, the full length BCMA CAR molecule includes one or more CDRs, VH, VL, scFv, or full-length sequences of, BCMA-1, BCMA-2, BCMA-3, BCMA-4, BCMA-5, BCMA-6, BCMA-7, BCMA-8, BCMA-9, BCMA-10, BCMA-11, BCMA-12, BCMA-13, BCMA-14, BCMA-15, 149362, 149363, 149364, 149365, 149366, 149367, 149368, 149369, BCMA_EBB-C1978-A4, BCMA_EBB-C1978-G1, BCMA_EBB-C1979-C1, BCMA_EBB-C1978-C7, BCMA_EBB-C1978-D10, BCMA_EBB-C1979-C12, BCMA_EBB-C1980-G4, BCMA_EBB-C1980-D2, BCMA_EBB-C1978-A10, BCMA_EBB-C1978-D4, BCMA_EBB-C1980-A2, BCMA_EBB-C1981-C3, BCMA_EBB-C1978-G4, A7D12.2, C11D5.3, C12A3.2, or C13F12.1, as disclosed in Tables U, V, W, and X, or a sequence substantially (e.g., 95-99%) identical thereto.

[0494] Additional exemplary BCMA-targeting sequences that can be used in the anti-BCMA CAR constructs are disclosed in WO 2017/021450, WO 2017/011804, WO 2017/025038, WO 2016/090327, WO 2016/130598, WO 2016/210293, WO 2016/090320, WO 2016/014789, WO 2016/094304, WO 2016/154055, WO 2015/166073, WO 2015/188119, WO 2015/158671, U.S. Pat. Nos. 9,243,058, 8,920,776, 9,273,141, 7,083,785, 9,034,324, US 2007/0049735, US 2015/0284467, US 2015/0051266, US 2015/0344844, US 2016/0131655, US 2016/0297884, US 2016/0297885, US 2017/0051308, US 2017/0051252, US 2017/0051252, WO 2016/020332, WO 2016/087531, WO 2016/079177, WO 2015/172800, WO 2017/008169, U.S. Pat. No. 9,340,621, US 2013/0273055, US 2016/0176973, US 2015/0368351, US 2017/0051068, US 2016/0368988, and US 2015/0232557, herein incorporated by reference in their entirety. In some embodiments, additional exemplary BCMA CAR constructs are generated using the VH and VL sequences from PCT Publication WO2012/0163805 (the contents of which are hereby incorporated by reference in its entirety).

TABLE 6
Amino Acid and Nucleic Acid Sequences of Exemplary Anti-BCMA scFv Domains and
BCMA CAR Molecules. The amino acid sequences variable heavy chain and variable
light chain sequences for each scFv is also provided.

| | | |
|---|---|---|
| | SEQ | |
| Name/ | ID | |
| Description | NO: | Sequence |

139109

| | | |
|---|---|---|
| 139109-aa | 49 | EVQLVESGGGLVQPGGSLRLSCAVSGFALSNHGMSWVRRAPGKGLE |
| ScFv domain | | WVSGIVYSGSTYYAASVKGRFTISRDNSRNTLYLQMNSLRPEDTAIYY |
| | | CSAHGGESDVWGQGTTVTVSSASGGGGSGGRASGGGGSDIQLTQSPSS |
| | | LSASVGDRVTITCRASQSISSYLNWYQQKPGKAPKLLIYAASSLQSGVP |
| | | SRFSGSGSGTDFTLTISSLQPEDFATYYCQQSYSTPYTFGQGTKVEIK |
| 139109-nt | 64 | GAAGTGCAATTGGTGGAATCAGGGGGAGGACTTGTGCAGCCTGGA |
| ScFv domain | | GGATCGCTGAGACTGTCATGTGCCGTGTCCGGCTTTGCCCTGTCCAA |
| | | CCACGGGATGTCCTGGGTCCGCCGCGCGCCTGGAAAGGGCCTCGAA |
| | | TGGGTGTCGGGTATTGTGTACAGCGGTAGCACCTACTATGCCGCAT |
| | | CCGTGAAGGGGAGATTCACCATCAGCCGGGACAACTCCAGGAACA |
| | | CTCTGTACCTCCAAATGAATTCGCTGAGGCCAGAGGACACTGCCAT |
| | | CTACTACTGCTCCGCGCATGGCGGAGAGTCCGACGTCTGGGGACAG |
| | | GGGACCACCGTGACCGTGTCTAGCGCGTCCGGCGGAGGCGGCAGC |
| | | GGGGGTCGGGCATCAGGGGGCGGCGGATCGGACATCCAGCTCACC |
| | | CAGTCCCCGAGCTCGCTGTCCGCCTCCGTGGGAGATCGGGTCACCA |
| | | TCACGTGCCGCGCCAGCCAGTCGATTTCCTCCTACCTGAACTGGTAC |
| | | CAACAGAAGCCCGGAAAAGCCCCGAAGCTTCTCATCTACGCCGCCT |
| | | CGAGCCTGCAGTCAGGAGTGCCCTCACGGTTCTCCGGCTCCGGTTC |
| | | CGGTACTGATTTCACCCTGACCATTTCCTCCCTGCAACCGGAGGACT |
| | | TCGCTACTTACTACTGCCAGCAGTCGTACTCCACCCCCTACACTTTC |
| | | GGACAAGGCACCAAGGTCGAAATCAAG |
| 139109-aa | 79 | EVQLVESGGGLVQPGGSLRLSCAVSGFALSNHGMSWVRRAPGKGLE |
| VH | | WVSGIVYSGSTYYAASVKGRFTISRDNSRNTLYLQMNSLRPEDTAIYY |
| | | CSAHGGESDVWGQGTTVTVSS |
| 139109-aa | 94 | DIQLTQSPSSLSASVGDRVTITCRASQSISSYLNWYQQKPGKAPKLLIYA |
| VL | | ASSLQSGVPSRFSGSGSGTDFTLTISSLQPEDFATYYCQQSYSTPYTFGQ |
| | | GTKVEIK |
| 139109-aa | 109 | MALPVTALLLPLALLLHAARPEVQLVESGGGLVQPGGSLRLSCAVSGF |
| Full CAR | | ALSNHGMSWVRRAPGKGLEWVSGIVYSGSTYYAASVKGRFTISRDNS |
| | | RNTLYLQMNSLRPEDTAIYYCSAHGGESDVWGQGTTVTVSSASGGGG |
| | | SGGRASGGGGSDIQLTQSPSSLSASVGDRVTITCRASQSISSYLNWYQQ |
| | | KPGKAPKLLIYAASSLQSGVPSRFSGSGSGTDFTLTISSLQPEDFATYYC |
| | | QQSYSTPYTFGQGTKVEIKTTTPAPRPPTPAPTIASQPLSLRPEACRPAA |
| | | GGAVHTRGLDFACDIYIWAPLAGTCGVLLLSLVITLYCKRGRKKLLYIF |
| | | KQPFMRPVQTTQEEDGCSCRFPEEEEGGCELRVKFSRSADAPAYKQGQ |
| | | NQLYNELNLGRREEYDVLDKRRGRDPEMGGKPRRKNPQEGLYNELQ |
| | | KDKMAEAYSEIGMKGERRRGKGHDGLYQGLSTATKDTYDALHMQAL |
| | | PPR |
| 139109-nt | 124 | ATGGCCCTCCCTGTCACCGCCCTGCTGCTTCCGCTGGCTCTTCTGCT |
| Full CAR | | CCACGCCGCTCGGCCCGAAGTGCAATTGGTGGAATCAGGGGGAGG |
| | | ACTTGTGCAGCCTGGAGGATCGCTGAGACTGTCATGTGCCGTGTCC |
| | | GGCTTTGCCCTGTCCAACCACGGGATGTCCTGGGTCCGCCGCGCGC |
| | | CTGGAAAGGGCCTCGAATGGGTGTCGGGTATTGTGTACAGCGGTAG |
| | | CACCTACTATGCCGCATCCGTGAAGGGGAGATTCACCATCAGCCGG |
| | | GACAACTCCAGGAACACTCTGTACCTCCAAATGAATTCGCTGAGGC |
| | | CAGAGGACACTGCCATCTACTACTGCTCCGCGCATGGCGGAGAGTC |
| | | CGACGTCTGGGGACAGGGGACCACCGTGACCGTGTCTAGCGCGTCC |
| | | GGCGGAGGCGGCAGCGGGGGTCGGGCATCAGGGGGCGGCGGATCG |
| | | GACATCCAGCTCACCCAGTCCCCGAGCTCGCTGTCCGCCTCCGTGG |
| | | GAGATCGGGTCACCATCACGTGCCGCGCCAGCCAGTCGATTTCCTC |
| | | CTACCTGAACTGGTACCAACAGAAGCCCGGAAAAGCCCCGAAGCTT |
| | | CTCATCTACGCCGCCTCGAGCCTGCAGTCAGGAGTGCCCTCACGGT |
| | | TCTCCGGCTCCGGTTCCGGTACTGATTTCACCCTGACCATTTCCTCC |
| | | CTGCAACCGGAGGACTTCGCTACTTACTACTGCCAGCAGTCGTACT |
| | | CCACCCCCTACACTTTCGGACAAGGCACCAAGGTCGAAATCAAGAC |
| | | CACTACCCCAGCACCGAGGCCACCCACCCCGGCTCCTACCATCGCC |
| | | TCCCAGCCTCTGTCCCTGCGTCCGGAGGCATGTAGACCCGCAGCTG |
| | | GTGGGGCCGTGCATACCCGGGGTCTTGACTTCGCCTGCGATATCTA |
| | | CATTTGGGCCCCTCTGGCTGGTACTTGCGGGGTCCTGCTGCTTTCAC |
| | | TCGTGATCACTCTTTACTGTAAGCGCGGTCGGAAGAAGCTGCTGTA |
| | | CATCTTTAAGCAACCCTTCATGAGGCCTGTGCAGACTACTCAAGAG |
| | | GAGGACGGCTGTTCATGCCGGTTCCCAGAGGAGGAGGAAGGCGGC |
| | | TGCGAACTGCGCGTGAAATTCAGCCGCAGCGCAGATGCTCCAGCCT |
| | | ACAAGCAGGGGCAGAACCAGCTCTACAACGAACTCAATCTTGGTCG |
| | | GAGAGAGGAGTACGACGTGCTGGACAAGCGGAGAGGACGGGACCC |
| | | AGAAATGGGCGGGAAGCCGCGCAGAAAGAATCCCCAAGAGGGCCT |
| | | GTACAACGAGCTCCAAAAGGATAAGATGGCAGAAGCCTATAGCGA |
| | | GATTGGTATGAAAGGGGAACGCAGAAGAGGCAAAGGCCACGACGG |
| | | ACTGTACCAGGGACTCAGCACCGCCACCAAGGACACCTATGACGCT |
| | | CTTCACATGCAGGCCCTGCCGCCTCGG |
| Full CAR | 392 | EVQLVESGGGLVQPGGSLRLSCAVSGFALSNHGMSWVRRAPGKGLE |
| without | | WVSGIVYSGSTYYAASVKGRFTISRDNSRNTLYLQMNSLRPEDTAIYY |
| leader | | CSAHGGESDVWGQGTTVTVSSASGGGGSGGRASGGGGSDIQLTQSPSS |
| sequence | | LSASVGDRVTITCRASQSISSYLNWYQQKPGKAPKLLIYAASSLQSGVP |
| | | SRFSGSGSGTDFTLTISSLQPEDFATYYCQQSYSTPYTFGQGTKVEIKTT |
| | | TPAPRPPTPAPTIASQPLSLRPEACRPAAGGAVHTRGLDFACDIYIWAPL |
| | | AGTCGVLLLSLVITLYCKRGRKKLLYIFKQPFMRPVQTTQEEDGCSCRF |
| | | PEEEEGGCELRVKFSRSADAPAYKQGQNQLYNELNLGRREEYDVLDK |
| | | RRGRDPEMGGKPRRKNPQEGLYNELQKDKMAEAYSEIGMKGERRRG |
| | | KGHDGLYQGLSTATKDTYDALHMQALPPR |
| Full CAR | 393 | EVQLVESGGGLVQPGGSLRLSCAVSGFALSNHGMSWVRRAPGKGLE |
| without | | WVSGIVYSGSTYYAASVKGRFTISRDNSRNTLYLQMNSLRPEDTAIYY |
| linker, | | CSAHGGESDVWGQGTTVTVSSDIQLTQSPSSLSASVGDRVTITCRASQS |
| without | | ISSYLNWYQQKPGKAPKLLIYAASSLQSGVPSRFSGSGSGTDFTLTISSL |
| leader | | QPEDFATYYCQQSYSTPYTFGQGTKVEIKTTTPAPRPPTPAPTIASQPLS |
| sequence | | LRPEACRPAAGGAVHTRGLDFACDIYIWAPLAGTCGVLLLSLVITLYC |
| | | KRGRKKLLYIFKQPFMRPVQTTQEEDGCSCRFPEEEEGGCELRVKFSRS |
| | | ADAPAYKQGQNQLYNELNLGRREEYDVLDKRRGRDPEMGGKPRRKN |
| | | PQEGLYNELQKDKMAEAYSEIGMKGERRRGKGHDGLYQGLSTATKD |
| | | TYDALHMQALPPR |

139103

| | | |
|---|---|---|
| 139103-aa | 39 | QVQLVESGGGLVQPGRSLRLSCAASGFTFSNYAMSWVRQAPGKGLG |
| ScFv domain | | WVSGISRSGENTYYADSVKGRFTISRDNSKNTLYLQMNSLRDEDTAVY |
| | | YCARSPAHYYGGMDVWGQGTTVTVSSASGGGGSGGRASGGGGSDIV |
| | | LTQSPGTLSLSPGERATLSCRASQSISSSFLAWYQQKPGQAPRLLIYGAS |
| | | RRATGIPDRFSGSGSGTDFTLTISRLEPEDSAVYYCQQYHSSPSWTFGQ |
| | | GTKLEIK |
| 139103-nt | 54 | CAAGTGCAACTCGTGGAATCTGGTGGAGGACTCGTGCAACCCGGAA |
| ScFv domain | | GATCGCTTAGACTGTCGTGTGCCGCCAGCGGGTTCACTTTCTCGAAC |
| | | TACGCGATGTCCTGGGTCCGCCAGGCACCCGGAAAGGGACTCGGTT |
| | | GGGTGTCCGGCATTTCCCGGTCCGGCGAAAATACCTACTACGCCGA |
| | | CTCCGTGAAGGGCCGCTTCACCATCTCAAGGGACAACAGCAAAAAC |
| | | ACCCTGTACTTGCAAATGAACTCCCTGCGGGATGAAGATACAGCCG |
| | | TGTACTATTGCGCCCGGTCGCCTGCCCATTACTACGGCGGAATGGA |
| | | CGTCTGGGGACAGGGAACCACTGTGACTGTCAGCAGCGCGTCGGGT |
| | | GGCGGCGGCTCAGGGGGTCGGGCCTCCGGGGGGGGAGGGTCCGAC |
| | | ATCGTGCTGACCCAGTCCCCGGGAACCCTGAGCCTGAGCCCGGGAG |
| | | AGCGCGCGACCCTGTCATGCCGGGCATCCCAGAGCATTAGCTCCTC |
| | | CTTTCTCGCCTGGTATCAGCAGAAGCCCGGACAGGCCCCGAGGCTG |
| | | CTGATCTACGGCGCTAGCAGAAGGGCTACCGGAATCCCAGACCGGT |
| | | TCTCCGGCTCCGGTTCCGGGACCGATTTCACCCTTACTATCTCGCGC |
| | | CTGGAACCTGAGGACTCCGCCGTCTACTACTGCCAGCAGTACCACT |
| | | CATCCCCGTCGTGGACGTTCGGACAGGGCACCAAGCTGGAGATTAA |
| | | G |
| 139103-aa | 69 | QVQLVESGGGLVQPGRSLRLSCAASGFTFSNYAMSWVRQAPGKGLG |
| VH | | WVSGISRSGENTYYADSVKGRFTISRDNSKNTLYLQMNSLRDEDTAVY |
| | | YCARSPAHYYGGMDVWGQGTTVTVSS |
| 139103-aa | 84 | DIVLTQSPGTLSLSPGERATLSCRASQSISSSFLAWYQQKPGQAPRLLIY |
| VL | | GASRRATGIPDRFSGSGSGTDFTLTISRLEPEDSAVYYCQQYHSSPSWTF |
| | | GQGTKLEIK |
| 139103-aa | 99 | MALPVTALLLPLALLLHAARPQVQLVESGGGLVQPGRSLRLSCAASGF |
| Full CAR | | TFSNYAMSWVRQAPGKGLGWVSGISRSGENTYYADSVKGRFTISRDN |
| | | SKNTLYLQMNSLRDEDTAVYYCARSPAHYYGGMDVWGQGTTVTVSS |
| | | ASGGGGSGGRASGGGGSDIVLTQSPGTLSLSPGERATLSCRASQSISSSF |
| | | LAWYQQKPGQAPRLLIYGASRRATGIPDRFSGSGSGTDFTLTISRLEPE |
| | | DSAVYYCQQYHSSPSWTFGQGTKLEIKTTTPAPRPPTPAPTIASQPLSLR |
| | | PEACRPAAGGAVHTRGLDFACDIYIWAPLAGTCGVLLLSLVITLYCKR |
| | | GRKKLLYIFKQPFMRPVQTTQEEDGCSCRFPEEEEGGCELRVKFSRSAD |
| | | APAYKQGQNQLYNELNLGRREEYDVLDKRRGRDPEMGGKPRRKNPQ |
| | | EGLYNELQKDKMAEAYSEIGMKGERRRGKGHDGLYQGLSTATKDTY |
| | | DALHMQALPPR |
| 139103-nt | 114 | ATGGCCCTCCCTGTCACCGCCCTGCTGCTTCCGCTGGCTCTTCTGCT |
| Full CAR | | CCACGCCGCTCGGCCCCAAGTGCAACTCGTGGAATCTGGTGGAGGA |
| | | CTCGTGCAACCCGGAAGATCGCTTAGACTGTCGTGTGCCGCCAGCG |
| | | GGTTCACTTTCTCGAACTACGCGATGTCCTGGGTCCGCCAGGCACCC |
| | | GGAAAGGGACTCGGTTGGGTGTCCGGCATTTCCCGGTCCGGCGAAA |
| | | ATACCTACTACGCCGACTCCGTGAAGGGCCGCTTCACCATCTCAAG |
| | | GGACAACAGCAAAAACACCCTGTACTTGCAAATGAACTCCCTGCGG |
| | | GATGAAGATACAGCCGTGTACTATTGCGCCCGGTCGCCTGCCCATT |
| | | ACTACGGCGGAATGGACGTCTGGGGACAGGGAACCACTGTGACTGT |
| | | CAGCAGCGCGTCGGGTGGCGGCGGCTCAGGGGGTCGGGCCTCCGG |
| | | GGGGGGAGGGTCCGACATCGTGCTGACCCAGTCCCCGGGAACCCTG |
| | | AGCCTGAGCCCGGGAGAGCGCGCGACCCTGTCATGCCGGGCATCCC |
| | | AGAGCATTAGCTCCTCCTTTCTCGCCTGGTATCAGCAGAAGCCCGG |
| | | ACAGGCCCCGAGGCTGCTGATCTACGGCGCTAGCAGAAGGGCTACC |
| | | GGAATCCCAGACCGGTTCTCCGGCTCCGGTTCCGGGACCGATTTCA |
| | | CCCTTACTATCTCGCGCCTGGAACCTGAGGACTCCGCCGTCTACTAC |
| | | TGCCAGCAGTACCACTCATCCCCGTCGTGGACGTTCGGACAGGGCA |
| | | CCAAGCTGGAGATTAAGACCACTACCCCAGCACCGAGGCCACCCAC |
| | | CCCGGCTCCTACCATCGCCTCCCAGCCTCTGTCCCTGCGTCCGGAGG |
| | | CATGTAGACCCGCAGCTGGTGGGGCCGTGCATACCCGGGGTCTTGA |
| | | CTTCGCCTGCGATATCTACATTTGGGCCCCTCTGGCTGGTACTTGCG |
| | | GGGTCCTGCTGCTTTCACTCGTGATCACTCTTTACTGTAAGCGCGGT |
| | | CGGAAGAAGCTGCTGTACATCTTTAAGCAACCCTTCATGAGGCCTG |
| | | TGCAGACTACTCAAGAGGAGGACGGCTGTTCATGCCGGTTCCCAGA |
| | | GGAGGAGGAAGGCGGCTGCGAACTGCGCGTGAAATTCAGCCGCAG |
| | | CGCAGATGCTCCAGCCTACAAGCAGGGGCAGAACCAGCTCTACAAC |
| | | GAACTCAATCTTGGTCGGAGAGAGGAGTACGACGTGCTGGACAAG |
| | | CGGAGAGGACGGGACCCAGAAATGGGCGGGAAGCCGCGCAGAAA |
| | | GAATCCCCAAGAGGGCCTGTACAACGAGCTCCAAAAGGATAAGAT |
| | | GGCAGAAGCCTATAGCGAGATTGGTATGAAAGGGGAACGCAGAAG |
| | | AGGCAAAGGCCACGACGGACTGTACCAGGGACTCAGCACCGCCAC |
| | | CAAGGACACCTATGACGCTCTTCACATGCAGGCCCTGCCGCCTCGG |

139105

| | | |
|---|---|---|
| 139105-aa | 40 | QVQLVESGGGLVQPGRSLRLSCAASGFTFDDYAMHWVRQAPGKGLE |
| ScFv domain | | WVSGISWNSGSIGYADSVKGRFTISRDNAKNSLYLQMNSLRAEDTALY |
| | | YCSVHSFLAYWGQGTLVTVSSASGGGGSGGRASGGGGSDIVMTQTPL |
| | | SLPVTPGEPASISCRSSQSLLHSNGYNYLDWYLQKPGQSPQLLIYLGSN |
| | | RASGVPDRFSGSGSGTDFTLKISRVEAEDVGVYYCMQALQTPYTFGQG |
| | | TKVEIK |
| 139105-nt | 55 | CAAGTGCAACTCGTCGAATCCGGTGGAGGTCTGGTCCAACCTGGTA |
| ScFv domain | | GAAGCCTGAGACTGTCGTGTGCGGCCAGCGGATTCACCTTTGATGA |
| | | CTATGCTATGCACTGGGTGCGGCAGGCCCCAGGAAAGGGCCTGGAA |
| | | TGGGTGTCGGGAATTAGCTGGAACTCCGGGTCCATTGGCTACGCCG |
| | | ACTCCGTGAAGGGCCGCTTCACCATCTCCCGCGACAACGCAAAGAA |
| | | CTCCCTGTACTTGCAAATGAACTCGCTCAGGGCTGAGGATACCGCG |
| | | CTGTACTACTGCTCCGTGCATTCCTTCCTGGCCTACTGGGGACAGGG |
| | | AACTCTGGTCACCGTGTCGAGCGCCTCCGGCGGCGGGGGCTCGGGT |
| | | GGACGGGCCTCGGGCGGAGGGGGGTCCGACATCGTGATGACCCAG |
| | | ACCCCGCTGAGCTTGCCCGTGACTCCCGGAGAGCCTGCATCCATCT |
| | | CCTGCCGGTCATCCCAGTCCCTTCTCCACTCCAACGGATACAACTAC |
| | | CTCGACTGGTACCTCCAGAAGCCGGGACAGAGCCCTCAGCTTCTGA |
| | | TCTACCTGGGGTCAAATAGAGCCTCAGGAGTGCCGGATCGGTTCAG |
| | | CGGATCTGGTTCGGGAACTGATTTCACTCTGAAGATTTCCCGCGTGG |
| | | AAGCCGAGGACGTGGGCGTCTACTACTGTATGCAGGCGCTGCAGAC |
| | | CCCCTATACCTTCGGCCAAGGGACGAAAGTGGAGATCAAG |
| 139105-aa | 70 | QVQLVESGGGLVQPGRSLRLSCAASGFTFDDYAMHWVRQAPGKGLE |
| VH | | WVSGISWNSGSIGYADSVKGRFTISRDNAKNSLYLQMNSLRAEDTALY |
| | | YCSVHSFLAYWGQGTLVTVSS |
| 139105-aa | 85 | DIVMTQTPLSLPVTPGEPASISCRSSQSLLHSNGYNYLDWYLQKPGQSP |
| VL | | QLLIYLGSNRASGVPDRFSGSGSGTDFTLKISRVEAEDVGVYYCMQAL |
| | | QTPYTFGQGTKVEIK |
| 139105-aa | 100 | MALPVTALLLPLALLLHAARPQVQLVESGGGLVQPGRSLRLSCAASGF |
| Full CAR | | TFDDYAMHWVRQAPGKGLEWVSGISWNSGSIGYADSVKGRFTISRDN |
| | | AKNSLYLQMNSLRAEDTALYYCSVHSFLAYWGQGTLVTVSSASGGGG |
| | | SGGRASGGGGSDIVMTQTPLSLPVTPGEPASISCRSSQSLLHSNGYNYL |
| | | DWYLQKPGQSPQLLIYLGSNRASGVPDRFSGSGSGTDFTLKISRVEAED |
| | | VGVYYCMQALQTPYTFGQGTKVEIKTTTPAPRPPTPAPTIASQPLSLRP |
| | | EACRPAAGGAVHTRGLDFACDIYIWAPLAGTCGVLLLSLVITLYCKRG |
| | | RKKLLYIFKQPFMRPVQTTQEEDGCSCRFPEEEEGGCELRVKFSRSADA |
| | | PAYKQGQNQLYNELNLGRREEYDVLDKRRGRDPEMGGKPRRKNPQE |
| | | GLYNELQKDKMAEAYSEIGMKGERRRGKGHDGLYQGLSTATKDTYD |
| | | ALHMQALPPR |
| 139105-nt | 115 | ATGGCCCTCCCTGTCACCGCCCTGCTGCTTCCGCTGGCTCTTCTGCT |
| Full CAR | | CCACGCCGCTCGGCCCCAAGTGCAACTCGTCGAATCCGGTGGAGGT |
| | | CTGGTCCAACCTGGTAGAAGCCTGAGACTGTCGTGTGCGGCCAGCG |
| | | GATTCACCTTTGATGACTATGCTATGCACTGGGTGCGGCAGGCCCC |
| | | AGGAAAGGGCCTGGAATGGGTGTCGGGAATTAGCTGGAACTCCGG |
| | | GTCCATTGGCTACGCCGACTCCGTGAAGGGCCGCTTCACCATCTCCC |
| | | GCGACAACGCAAAGAACTCCCTGTACTTGCAAATGAACTCGCTCAG |
| | | GGCTGAGGATACCGCGCTGTACTACTGCTCCGTGCATTCCTTCCTGG |
| | | CCTACTGGGGACAGGGAACTCTGGTCACCGTGTCGAGCGCCTCCGG |
| | | CGGCGGGGGCTCGGGTGGACGGGCCTCGGGCGGAGGGGGGTCCGA |
| | | CATCGTGATGACCCAGACCCCGCTGAGCTTGCCCGTGACTCCCGGA |
| | | GAGCCTGCATCCATCTCCTGCCGGTCATCCCAGTCCCTTCTCCACTC |
| | | CAACGGATACAACTACCTCGACTGGTACCTCCAGAAGCCGGGACAG |
| | | AGCCCTCAGCTTCTGATCTACCTGGGGTCAAATAGAGCCTCAGGAG |
| | | TGCCGGATCGGTTCAGCGGATCTGGTTCGGGAACTGATTTCACTCTG |
| | | AAGATTTCCCGCGTGGAAGCCGAGGACGTGGGCGTCTACTACTGTA |
| | | TGCAGGCGCTGCAGACCCCCTATACCTTCGGCCAAGGGACGAAAGT |
| | | GGAGATCAAGACCACTACCCCAGCACCGAGGCCACCCACCCCGGCT |
| | | CCTACCATCGCCTCCCAGCCTCTGTCCCTGCGTCCGGAGGCATGTAG |
| | | ACCCGCAGCTGGTGGGGCCGTGCATACCCGGGGTCTTGACTTCGCC |
| | | TGCGATATCTACATTTGGGCCCCTCTGGCTGGTACTTGCGGGGTCCT |
| | | GCTGCTTTCACTCGTGATCACTCTTTACTGTAAGCGCGGTCGGAAGA |
| | | AGCTGCTGTACATCTTTAAGCAACCCTTCATGAGGCCTGTGCAGACT |
| | | ACTCAAGAGGAGGACGGCTGTTCATGCCGGTTCCCAGAGGAGGAG |
| | | GAAGGCGGCTGCGAACTGCGCGTGAAATTCAGCCGCAGCGCAGAT |
| | | GCTCCAGCCTACAAGCAGGGGCAGAACCAGCTCTACAACGAACTCA |
| | | ATCTTGGTCGGAGAGAGGAGTACGACGTGCTGGACAAGCGGAGAG |
| | | GACGGGACCCAGAAATGGGCGGGAAGCCGCGCAGAAAGAATCCCC |
| | | AAGAGGGCCTGTACAACGAGCTCCAAAAGGATAAGATGGCAGAAG |
| | | CCTATAGCGAGATTGGTATGAAAGGGGAACGCAGAAGAGGCAAAG |
| | | GCCACGACGGACTGTACCAGGGACTCAGCACCGCCACCAAGGACA |
| | | CCTATGACGCTCTTCACATGCAGGCCCTGCCGCCTCGG |

139111

| | | |
|---|---|---|
| 139111-aa | 41 | EVQLLESGGGLVQPGGSLRLSCAVSGFALSNHGMSWVRRAPGKGLEW |
| ScFv domain | | VSGIVYSGSTYYAASVKGRFTISRDNSRNTLYLQMNSLRPEDTAIYYCS |
| | | AHGGESDVWGQGTTVTVSSASGGGGSGGRASGGGGSDIVMTQTPLSL |
| | | SVTPGQPASISCKSSQSLLRNDGKTPLYWYLQKAGQPPQLLIYEVSNRF |
| | | SGVPDRFSGSGSGTDFTLKISRVEAEDVGAYYCMQNIQFPSFGGGTKLE |
| | | IK |
| 139111-nt | 56 | GAAGTGCAATTGTTGGAATCTGGAGGAGGACTTGTGCAGCCTGGAG |
| ScFv domain | | GATCACTGAGACTTTCGTGTGCGGTGTCAGGCTTCGCCCTGAGCAA |
| | | CCACGGCATGAGCTGGGTGCGGAGAGCCCCGGGGAAGGGTCTGGA |
| | | ATGGGTGTCCGGGATCGTCTACTCCGGTTCAACTTACTACGCCGCA |
| | | AGCGTGAAGGGTCGCTTCACCATTTCCCGCGATAACTCCCGGAACA |
| | | CCCTGTACCTCCAAATGAACTCCCTGCGGCCCGAGGACACCGCCAT |
| | | CTACTACTGTTCCGCGCATGGAGGAGAGTCCGATGTCTGGGGACAG |
| | | GGCACTACCGTGACCGTGTCGAGCGCCTCGGGGGGAGGAGGCTCCG |
| | | GCGGTCGCGCCTCCGGGGGGGGTGGCAGCGACATTGTGATGACGCA |
| | | GACTCCACTCTCGCTGTCCGTGACCCCGGGACAGCCCGCGTCCATCT |
| | | CGTGCAAGAGCTCCCAGAGCCTGCTGAGGAACGACGGAAAGACTC |
| | | CTCTGTATTGGTACCTCCAGAAGGCTGGACAGCCCCCGCAACTGCT |
| | | CATCTACGAAGTGTCAAATCGCTTCTCCGGGGTGCCGGATCGGTTTT |
| | | CCGGCTCGGGATCGGGCACCGACTTCACCCTGAAAATCTCCAGGGT |
| | | CGAGGCCGAGGACGTGGGAGCCTACTACTGCATGCAAAACATCCA |
| | | GTTCCCTTCCTTCGGCGGCGGCACAAAGCTGGAGATTAAG |
| 139111-aa | 71 | EVQLLESGGGLVQPGGSLRLSCAVSGFALSNHGMSWVRRAPGKGLEW |
| VH | | VSGIVYSGSTYYAASVKGRFTISRDNSRNTLYLQMNSLRPEDTAIYYCS |
| | | AHGGESDVWGQGTTVTVSS |
| 139111-aa | 86 | DIVMTQTPLSLSVTPGQPASISCKSSQSLLRNDGKTPLYWYLQKAGQPP |
| VL | | QLLIYEVSNRFSGVPDRFSGSGSGTDFTLKISRVEAEDVGAYYCMQNIQ |
| | | FPSFGGGTKLEIK |
| 139111-aa | 101 | MALPVTALLLPLALLLHAARPEVQLLESGGGLVQPGGSLRLSCAVSGF |
| Full CAR | | ALSNHGMSWVRRAPGKGLEWVSGIVYSGSTYYAASVKGRFTISRDNS |
| | | RNTLYLQMNSLRPEDTAIYYCSAHGGESDVWGQGTTVTVSSASGGGG |
| | | SGGRASGGGGSDIVMTQTPLSLSVTPGQPASISCKSSQSLLRNDGKTPL |
| | | YWYLQKAGQPPQLLIYEVSNRFSGVPDRFSGSGSGTDFTLKISRVEAED |
| | | VGAYYCMQNIQFPSFGGGTKLEIKTTTPAPRPPTPAPTIASQPLSLRPEA |
| | | CRPAAGGAVHTRGLDFACDIYIWAPLAGTCGVLLLSLVITLYCKRGRK |
| | | KLLYIFKQPFMRPVQTTQEEDGCSCRFPEEEEGGCELRVKFSRSADAPA |
| | | YKQGQNQLYNELNLGRREEYDVLDKRRGRDPEMGGKPRRKNPQEGL |
| | | YNELQKDKMAEAYSEIGMKGERRRGKGHDGLYQGLSTATKDTYDAL |
| | | HMQALPPR |
| 139111-nt | 116 | ATGGCCCTCCCTGTCACCGCCCTGCTGCTTCCGCTGGCTCTTCTGCT |
| Full CAR | | CCACGCCGCTCGGCCCGAAGTGCAATTGTTGGAATCTGGAGGAGGA |
| | | CTTGTGCAGCCTGGAGGATCACTGAGACTTTCGTGTGCGGTGTCAG |
| | | GCTTCGCCCTGAGCAACCACGGCATGAGCTGGGTGCGGAGAGCCCC |
| | | GGGGAAGGGTCTGGAATGGGTGTCCGGGATCGTCTACTCCGGTTCA |
| | | ACTTACTACGCCGCAAGCGTGAAGGGTCGCTTCACCATTTCCCGCG |
| | | ATAACTCCCGGAACACCCTGTACCTCCAAATGAACTCCCTGCGGCC |
| | | CGAGGACACCGCCATCTACTACTGTTCCGCGCATGGAGGAGAGTCC |
| | | GATGTCTGGGGACAGGGCACTACCGTGACCGTGTCGAGCGCCTCGG |
| | | GGGGAGGAGGCTCCGGCGGTCGCGCCTCCGGGGGGGGTGGCAGCG |
| | | ACATTGTGATGACGCAGACTCCACTCTCGCTGTCCGTGACCCCGGG |
| | | ACAGCCCGCGTCCATCTCGTGCAAGAGCTCCCAGAGCCTGCTGAGG |
| | | AACGACGGAAAGACTCCTCTGTATTGGTACCTCCAGAAGGCTGGAC |
| | | AGCCCCCGCAACTGCTCATCTACGAAGTGTCAAATCGCTTCTCCGG |
| | | GGTGCCGGATCGGTTTTCCGGCTCGGGATCGGGCACCGACTTCACC |
| | | CTGAAAATCTCCAGGGTCGAGGCCGAGGACGTGGGAGCCTACTACT |
| | | GCATGCAAAACATCCAGTTCCCTTCCTTCGGCGGCGGCACAAAGCT |
| | | GGAGATTAAGACCACTACCCCAGCACCGAGGCCACCCACCCCGGCT |
| | | CCTACCATCGCCTCCCAGCCTCTGTCCCTGCGTCCGGAGGCATGTAG |
| | | ACCCGCAGCTGGTGGGGCCGTGCATACCCGGGGTCTTGACTTCGCC |
| | | TGCGATATCTACATTTGGGCCCCTCTGGCTGGTACTTGCGGGGTCCT |
| | | GCTGCTTTCACTCGTGATCACTCTTTACTGTAAGCGCGGTCGGAAGA |
| | | AGCTGCTGTACATCTTTAAGCAACCCTTCATGAGGCCTGTGCAGACT |
| | | ACTCAAGAGGAGGACGGCTGTTCATGCCGGTTCCCAGAGGAGGAG |
| | | GAAGGCGGCTGCGAACTGCGCGTGAAATTCAGCCGCAGCGCAGAT |
| | | GCTCCAGCCTACAAGCAGGGGCAGAACCAGCTCTACAACGAACTCA |
| | | ATCTTGGTCGGAGAGAGGAGTACGACGTGCTGGACAAGCGGAGAG |
| | | GACGGGACCCAGAAATGGGCGGGAAGCCGCGCAGAAAGAATCCCC |
| | | AAGAGGGCCTGTACAACGAGCTCCAAAAGGATAAGATGGCAGAAG |
| | | CCTATAGCGAGATTGGTATGAAAGGGGAACGCAGAAGAGGCAAAG |
| | | GCCACGACGGACTGTACCAGGGACTCAGCACCGCCACCAAGGACA |
| | | CCTATGACGCTCTTCACATGCAGGCCCTGCCGCCTCGG |

139100

| | | |
|---|---|---|
| 139100-aa | 42 | QVQLVQSGAEVRKTGASVKVSCKASGYIFDNFGINWVRQAPGQGLEW |
| ScFv domain | | MGWINPKNNNTNYAQKFQGRVTITADESTNTAYMEVSSLRSEDTAVY |
| | | YCARGPYYYQSYMDVWGQGTMVTVSSASGGGGSGGRASGGGGSDIV |
| | | MTQTPLSLPVTPGEPASISCRSSQSLLHSNGYNYLNWYLQKPGQSPQLL |
| | | IYLGSKRASGVPDRFSGSGSGTDFTLHITRVGAEDVGVYYCMQALQTP |
| | | YTFGQGTKLEIK |
| 139100-nt | 57 | CAAGTCCAACTCGTCCAGTCCGGCGCAGAAGTCAGAAAAACCGGTG |
| ScFv domain | | CTAGCGTGAAAGTGTCCTGCAAGGCCTCCGGCTACATTTTCGATAA |
| | | CTTCGGAATCAACTGGGTCAGACAGGCCCCGGGCCAGGGGCTGGA |
| | | ATGGATGGGATGGATCAACCCCAAGAACAACAACACCAACTACGC |
| | | ACAGAAGTTCCAGGGCCGCGTGACTATCACCGCCGATGAATCGACC |
| | | AATACCGCCTACATGGAGGTGTCCTCCCTGCGGTCGGAGGACACTG |
| | | CCGTGTATTACTGCGCGAGGGGCCCATACTACTACCAAAGCTACAT |
| | | GGACGTCTGGGGACAGGGAACCATGGTGACCGTGTCATCCGCCTCC |
| | | GGTGGTGGAGGCTCCGGGGGGCGGGCTTCAGGAGGCGGAGGAAGC |
| | | GATATTGTGATGACCCAGACTCCGCTTAGCCTGCCCGTGACTCCTGG |
| | | AGAACCGGCCTCCATTTCCTGCCGGTCCTCGCAATCACTCCTGCATT |
| | | CCAACGGTTACAACTACCTGAATTGGTACCTCCAGAAGCCTGGCCA |
| | | GTCGCCCCAGTTGCTGATCTATCTGGGCTCGAAGCGCGCCTCCGGG |
| | | GTGCCTGACCGGTTTAGCGGATCTGGGAGCGGCACGGACTTCACTC |
| | | TCCACATCACCCGCGTGGGAGCGGAGGACGTGGGAGTGTACTACTG |
| | | TATGCAGGCGCTGCAGACTCCGTACACATTCGGACAGGGCACCAAG |
| | | CTGGAGATCAAG |
| 139100-aa | 72 | QVQLVQSGAEVRKTGASVKVSCKASGYIFDNFGINWVRQAPGQGLEW |
| VH | | MGWINPKNNNTNYAQKFQGRVTITADESTNTAYMEVSSLRSEDTAVY |
| | | YCARGPYYYQSYMDVWGQGTMVTVSS |
| 139100-aa | 87 | DIVMTQTPLSLPVTPGEPASISCRSSQSLLHSNGYNYLNWYLQKPGQSP |
| VL | | QLLIYLGSKRASGVPDRFSGSGSGTDFTLHITRVGAEDVGVYYCMQAL |
| | | QTPYTFGQGTKLEIK |
| 139100-aa | 102 | MALPVTALLLPLALLLHAARPQVQLVQSGAEVRKTGASVKVSCKASG |
| Full CAR | | YIFDNFGINWVRQAPGQGLEWMGWINPKNNNTNYAQKFQGRVTITAD |
| | | ESTNTAYMEVSSLRSEDTAVYYCARGPYYYQSYMDVWGQGTMVTVS |
| | | SASGGGGSGGRASGGGGSDIVMTQTPLSLPVTPGEPASISCRSSQSLLHS |
| | | NGYNYLNWYLQKPGQSPQLLIYLGSKRASGVPDRFSGSGSGTDFTLHI |
| | | TRVGAEDVGVYYCMQALQTPYTFGQGTKLEIKTTTPAPRPPTPAPTIAS |
| | | QPLSLRPEACRPAAGGAVHTRGLDFACDIYIWAPLAGTCGVLLLSLVIT |
| | | LYCKRGRKKLLYIFKQPFMRPVQTTQEEDGCSCRFPEEEEGGCELRVK |
| | | FSRSADAPAYKQGQNQLYNELNLGRREEYDVLDKRRGRDPEMGGKP |
| | | RRKNPQEGLYNELQKDKMAEAYSEIGMKGERRRGKGHDGLYQGLST |
| | | ATKDTYDALHMQALPPR |
| 139100-nt | 117 | ATGGCCCTCCCTGTCACCGCCCTGCTGCTTCCGCTGGCTCTTCTGCT |
| Full CAR | | CCACGCCGCTCGGCCCCAAGTCCAACTCGTCCAGTCCGGCGCAGAA |
| | | GTCAGAAAAACCGGTGCTAGCGTGAAAGTGTCCTGCAAGGCCTCCG |
| | | GCTACATTTTCGATAACTTCGGAATCAACTGGGTCAGACAGGCCCC |
| | | GGGCCAGGGGCTGGAATGGATGGGATGGATCAACCCCAAGAACAA |
| | | CAACACCAACTACGCACAGAAGTTCCAGGGCCGCGTGACTATCACC |
| | | GCCGATGAATCGACCAATACCGCCTACATGGAGGTGTCCTCCCTGC |
| | | GGTCGGAGGACACTGCCGTGTATTACTGCGCGAGGGGCCCATACTA |
| | | CTACCAAAGCTACATGGACGTCTGGGGACAGGGAACCATGGTGACC |
| | | GTGTCATCCGCCTCCGGTGGTGGAGGCTCCGGGGGGCGGGCTTCAG |
| | | GAGGCGGAGGAAGCGATATTGTGATGACCCAGACTCCGCTTAGCCT |
| | | GCCCGTGACTCCTGGAGAACCGGCCTCCATTTCCTGCCGGTCCTCGC |
| | | AATCACTCCTGCATTCCAACGGTTACAACTACCTGAATTGGTACCTC |
| | | CAGAAGCCTGGCCAGTCGCCCCAGTTGCTGATCTATCTGGGCTCGA |
| | | AGCGCGCCTCCGGGGTGCCTGACCGGTTTAGCGGATCTGGGAGCGG |
| | | CACGGACTTCACTCTCCACATCACCCGCGTGGGAGCGGAGGACGTG |
| | | GGAGTGTACTACTGTATGCAGGCGCTGCAGACTCCGTACACATTCG |
| | | GACAGGGCACCAAGCTGGAGATCAAGACCACTACCCCAGCACCGA |
| | | GGCCACCCACCCCGGCTCCTACCATCGCCTCCCAGCCTCTGTCCCTG |
| | | CGTCCGGAGGCATGTAGACCCGCAGCTGGTGGGGCCGTGCATACCC |
| | | GGGGTCTTGACTTCGCCTGCGATATCTACATTTGGGCCCCTCTGGCT |
| | | GGTACTTGCGGGGTCCTGCTGCTTTCACTCGTGATCACTCTTTACTG |
| | | TAAGCGCGGTCGGAAGAAGCTGCTGTACATCTTTAAGCAACCCTTC |
| | | ATGAGGCCTGTGCAGACTACTCAAGAGGAGGACGGCTGTTCATGCC |
| | | GGTTCCCAGAGGAGGAGGAAGGCGGCTGCGAACTGCGCGTGAAAT |
| | | TCAGCCGCAGCGCAGATGCTCCAGCCTACAAGCAGGGGCAGAACC |
| | | AGCTCTACAACGAACTCAATCTTGGTCGGAGAGAGGAGTACGACGT |
| | | GCTGGACAAGCGGAGAGGACGGGACCCAGAAATGGGCGGGAAGCC |
| | | GCGCAGAAAGAATCCCCAAGAGGGCCTGTACAACGAGCTCCAAAA |
| | | GGATAAGATGGCAGAAGCCTATAGCGAGATTGGTATGAAAGGGGA |
| | | ACGCAGAAGAGGCAAAGGCCACGACGGACTGTACCAGGGACTCAG |
| | | CACCGCCACCAAGGACACCTATGACGCTCTTCACATGCAGGCCCTG |
| | | CCGCCTCGG |

139101

| | | |
|---|---|---|
| 139101-aa | 43 | QVQLQESGGGLVQPGGSLRLSCAASGFTFSSDAMTWVRQAPGKGLEW |
| ScFv domain | | VSVISGSGGTTYYADSVKGRFTISRDNSKNTLYLQMNSLRAEDTAVYY |
| | | CAKLDSSGYYYARGPRYWGQGTLVTVSSASGGGGSGGRASGGGGSDI |
| | | QLTQSPSSLSASVGDRVTITCRASQSISSYLNWYQQKPGKAPKLLIYGA |
| | | STLASGVPARFSGSGSGTHFTLTINSLQSEDSATYYCQQSYKRASFGQG |
| | | TKVEIK |
| 139101-nt | 58 | CAAGTGCAACTTCAAGAATCAGGCGGAGGACTCGTGCAGCCCGGA |
| ScFv domain | | GGATCATTGCGGCTCTCGTGCGCCGCCTCGGGCTTCACCTTCTCGAG |
| | | CGACGCCATGACCTGGGTCCGCCAGGCCCCGGGGAAGGGGCTGGA |
| | | ATGGGTGTCTGTGATTTCCGGCTCCGGGGGAACTACGTACTACGCC |
| | | GATTCCGTGAAAGGTCGCTTCACTATCTCCCGGGACAACAGCAAGA |
| | | ACACCCTTTATCTGCAAATGAATTCCCTCCGCGCCGAGGACACCGC |
| | | CGTGTACTACTGCGCCAAGCTGGACTCCTCGGGCTACTACTATGCCC |
| | | GGGGTCCGAGATACTGGGGACAGGGAACCCTCGTGACCGTGTCCTC |
| | | CGCGTCCGGCGGAGGAGGGTCGGGAGGGCGGGCCTCCGGCGGCGG |
| | | CGGTTCGGACATCCAGCTGACCCAGTCCCCATCCTCACTGAGCGCA |
| | | AGCGTGGGCGACAGAGTCACCATTACATGCAGGGCGTCCCAGAGC |
| | | ATCAGCTCCTACCTGAACTGGTACCAACAGAAGCCTGGAAAGGCTC |
| | | CTAAGCTGTTGATCTACGGGGCTTCGACCCTGGCATCCGGGGTGCC |
| | | CGCGAGGTTTAGCGGAAGCGGTAGCGGCACTCACTTCACTCTGACC |
| | | ATTAACAGCCTCCAGTCCGAGGATTCAGCCACTTACTACTGTCAGC |
| | | AGTCCTACAAGCGGGCCAGCTTCGGACAGGGCACTAAGGTCGAGAT |
| | | CAAG |
| 139101-aa | 73 | QVQLQESGGGLVQPGGSLRLSCAASGFTFSSDAMTWVRQAPGKGLEW |
| VH | | VSVISGSGGTTYYADSVKGRFTISRDNSKNTLYLQMNSLRAEDTAVYY |
| | | CAKLDSSGYYYARGPRYWGQGTLVTVSS |
| 139101-aa | 88 | DIQLTQSPSSLSASVGDRVTITCRASQSISSYLNWYQQKPGKAPKLLIYG |
| VL | | ASTLASGVPARFSGSGSGTHFTLTINSLQSEDSATYYCQQSYKRASFGQ |
| | | GTKVEIK |
| 139101-aa | 103 | MALPVTALLLPLALLLHAARPQVQLQESGGGLVQPGGSLRLSCAASGF |
| Full CAR | | TFSSDAMTWVRQAPGKGLEWVSVISGSGGTTYYADSVKGRFTISRDNS |
| | | KNTLYLQMNSLRAEDTAVYYCAKLDSSGYYYARGPRYWGQGTLVTV |
| | | SSASGGGGSGGRASGGGGSDIQLTQSPSSLSASVGDRVTITCRASQSISS |
| | | YLNWYQQKPGKAPKLLIYGASTLASGVPARFSGSGSGTHFTLTINSLQS |
| | | EDSATYYCQQSYKRASFGQGTKVEIKTTTPAPRPPTPAPTIASQPLSLRP |
| | | EACRPAAGGAVHTRGLDFACDIYIWAPLAGTCGVLLLSLVITLYCKRG |
| | | RKKLLYIFKQPFMRPVQTTQEEDGCSCRFPEEEEGGCELRVKFSRSADA |
| | | PAYKQGQNQLYNELNLGRREEYDVLDKRRGRDPEMGGKPRRKNPQE |
| | | GLYNELQKDKMAEAYSEIGMKGERRRGKGHDGLYQGLSTATKDTYD |
| | | ALHMQALPPR |
| 139101-nt | 118 | ATGGCCCTCCCTGTCACCGCCCTGCTGCTTCCGCTGGCTCTTCTGCT |
| Full CAR | | CCACGCCGCTCGGCCCCAAGTGCAACTTCAAGAATCAGGCGGAGGA |
| | | CTCGTGCAGCCCGGAGGATCATTGCGGCTCTCGTGCGCCGCCTCGG |
| | | GCTTCACCTTCTCGAGCGACGCCATGACCTGGGTCCGCCAGGCCCC |
| | | GGGGAAGGGGCTGGAATGGGTGTCTGTGATTTCCGGCTCCGGGGGA |
| | | ACTACGTACTACGCCGATTCCGTGAAAGGTCGCTTCACTATCTCCCG |
| | | GGACAACAGCAAGAACACCCTTTATCTGCAAATGAATTCCCTCCGC |
| | | GCCGAGGACACCGCCGTGTACTACTGCGCCAAGCTGGACTCCTCGG |
| | | GCTACTACTATGCCCGGGGTCCGAGATACTGGGGACAGGGAACCCT |
| | | CGTGACCGTGTCCTCCGCGTCCGGCGGAGGAGGGTCGGGAGGGCG |
| | | GGCCTCCGGCGGCGGCGGTTCGGACATCCAGCTGACCCAGTCCCCA |
| | | TCCTCACTGAGCGCAAGCGTGGGCGACAGAGTCACCATTACATGCA |
| | | GGGCGTCCCAGAGCATCAGCTCCTACCTGAACTGGTACCAACAGAA |
| | | GCCTGGAAAGGCTCCTAAGCTGTTGATCTACGGGGCTTCGACCCTG |
| | | GCATCCGGGGTGCCCGCGAGGTTTAGCGGAAGCGGTAGCGGCACTC |
| | | ACTTCACTCTGACCATTAACAGCCTCCAGTCCGAGGATTCAGCCACT |
| | | TACTACTGTCAGCAGTCCTACAAGCGGGCCAGCTTCGGACAGGGCA |
| | | CTAAGGTCGAGATCAAGACCACTACCCCAGCACCGAGGCCACCCAC |
| | | CCCGGCTCCTACCATCGCCTCCCAGCCTCTGTCCCTGCGTCCGGAGG |
| | | CATGTAGACCCGCAGCTGGTGGGGCCGTGCATACCCGGGGTCTTGA |
| | | CTTCGCCTGCGATATCTACATTTGGGCCCCTCTGGCTGGTACTTGCG |
| | | GGGTCCTGCTGCTTTCACTCGTGATCACTCTTTACTGTAAGCGCGGT |
| | | CGGAAGAAGCTGCTGTACATCTTTAAGCAACCCTTCATGAGGCCTG |
| | | TGCAGACTACTCAAGAGGAGGACGGCTGTTCATGCCGGTTCCCAGA |
| | | GGAGGAGGAAGGCGGCTGCGAACTGCGCGTGAAATTCAGCCGCAG |
| | | CGCAGATGCTCCAGCCTACAAGCAGGGGCAGAACCAGCTCTACAAC |
| | | GAACTCAATCTTGGTCGGAGAGAGGAGTACGACGTGCTGGACAAG |
| | | CGGAGAGGACGGGACCCAGAAATGGGCGGGAAGCCGCGCAGAAA |
| | | GAATCCCCAAGAGGGCCTGTACAACGAGCTCCAAAAGGATAAGAT |
| | | GGCAGAAGCCTATAGCGAGATTGGTATGAAAGGGGAACGCAGAAG |
| | | AGGCAAAGGCCACGACGGACTGTACCAGGGACTCAGCACCGCCAC |
| | | CAAGGACACCTATGACGCTCTTCACATGCAGGCCCTGCCGCCTCGG |

139102

| | | |
|---|---|---|
| 139102-aa | 44 | QVQLVQSGAEVKKPGASVKVSCKASGYTFSNYGITWVRQAPGQGLE |
| ScFv domain | | WMGWISAYNGNTNYAQKFQGRVTMTRNTSISTAYMELSSLRSEDTAV |
| | | YYCARGPYYYYMDVWGKGTMVTVSSASGGGGSGGRASGGGGSEIV |
| | | MTQSPLSLPVTPGEPASISCRSSQSLLYSNGYNYVDWYLQKPGQSPQLL |
| | | IYLGSNRASGVPDRFSGSGSGTDFKLQISRVEAEDVGIYYCMQGRQFPY |
| | | SFGQGTKVEIK |
| 139102-nt | 59 | CAAGTCCAACTGGTCCAGAGCGGTGCAGAAGTGAAGAAGCCCGGA |
| ScFv domain | | GCGAGCGTGAAAGTGTCCTGCAAGGCTTCCGGGTACACCTTCTCCA |
| | | ACTACGGCATCACTTGGGTGCGCCAGGCCCCGGGACAGGGCCTGGA |
| | | ATGGATGGGGTGGATTTCCGCGTACAACGGCAATACGAACTACGCT |
| | | CAGAAGTTCCAGGGTAGAGTGACCATGACTAGGAACACCTCCATTT |
| | | CCACCGCCTACATGGAACTGTCCTCCCTGCGGAGCGAGGACACCGC |
| | | CGTGTACTATTGCGCCCGGGGACCATACTACTACTACATGGATGTCT |
| | | GGGGGAAGGGGACTATGGTCACCGTGTCATCCGCCTCGGGAGGCG |
| | | GCGGATCAGGAGGACGCGCCTCTGGTGGTGGAGGATCGGAGATCG |
| | | TGATGACCCAGAGCCCTCTCTCCTTGCCCGTGACTCCTGGGGAGCCC |
| | | GCATCCATTTCATGCCGGAGCTCCCAGTCACTTCTCTACTCCAACGG |
| | | CTATAACTACGTGGATTGGTACCTCCAAAAGCCGGGCCAGAGCCCG |
| | | CAGCTGCTGATCTACCTGGGCTCGAACAGGGCCAGCGGAGTGCCTG |
| | | ACCGGTTCTCCGGGTCGGGAAGCGGGACCGACTTCAAGCTGCAAAT |
| | | CTCGAGAGTGGAGGCCGAGGACGTGGGAATCTACTACTGTATGCAG |
| | | GGCCGCCAGTTTCCGTACTCGTTCGGACAGGGCACCAAAGTGGAAA |
| | | TCAAG |
| 139102-aa | 74 | QVQLVQSGAEVKKPGASVKVSCKASGYTFSNYGITWVRQAPGQGLE |
| VH | | WMGWISAYNGNTNYAQKFQGRVTMTRNTSISTAYMELSSLRSEDTAV |
| | | YYCARGPYYYYMDVWGKGTMVTVSS |
| 139102-aa | 89 | EIVMTQSPLSLPVTPGEPASISCRSSQSLLYSNGYNYVDWYLQKPGQSP |
| VL | | QLLIYLGSNRASGVPDRFSGSGSGTDFKLQISRVEAEDVGIYYCMQGR |
| | | QFPYSFGQGTKVEIK |
| 139102-aa | 104 | MALPVTALLLPLALLLHAARPQVQLVQSGAEVKKPGASVKVSCKASG |
| Full CAR | | YTFSNYGITWVRQAPGQGLEWMGWISAYNGNTNYAQKFQGRVTMTR |
| | | NTSISTAYMELSSLRSEDTAVYYCARGPYYYYMDVWGKGTMVTVSSA |
| | | SGGGGSGGRASGGGGSEIVMTQSPLSLPVTPGEPASISCRSSQSLLYSNG |
| | | YNYVDWYLQKPGQSPQLLIYLGSNRASGVPDRFSGSGSGTDFKLQISR |
| | | VEAEDVGIYYCMQGRQFPYSFGQGTKVEIKTTTPAPRPPTPAPTIASQP |
| | | LSLRPEACRPAAGGAVHTRGLDFACDIYIWAPLAGTCGVLLLSLVITLY |
| | | CKRGRKKLLYIFKQPFMRPVQTTQEEDGCSCRFPEEEEGGCELRVKFSR |
| | | SADAPAYKQGQNQLYNELNLGRREEYDVLDKRRGRDPEMGGKPRRK |
| | | NPQEGLYNELQKDKMAEAYSEIGMKGERRRGKGHDGLYQGLSTATK |
| | | DTYDALHMQALPPR |
| 139102-nt | 119 | ATGGCCCTCCCTGTCACCGCCCTGCTGCTTCCGCTGGCTCTTCTGCT |
| Full CAR | | CCACGCCGCTCGGCCCCAAGTCCAACTGGTCCAGAGCGGTGCAGAA |
| | | GTGAAGAAGCCCGGAGCGAGCGTGAAAGTGTCCTGCAAGGCTTCC |
| | | GGGTACACCTTCTCCAACTACGGCATCACTTGGGTGCGCCAGGCCC |
| | | CGGGACAGGGCCTGGAATGGATGGGGTGGATTTCCGCGTACAACG |
| | | GCAATACGAACTACGCTCAGAAGTTCCAGGGTAGAGTGACCATGAC |
| | | TAGGAACACCTCCATTTCCACCGCCTACATGGAACTGTCCTCCCTGC |
| | | GGAGCGAGGACACCGCCGTGTACTATTGCGCCCGGGGACCATACTA |
| | | CTACTACATGGATGTCTGGGGGAAGGGGACTATGGTCACCGTGTCA |
| | | TCCGCCTCGGGAGGCGGCGGATCAGGAGGACGCGCCTCTGGTGGTG |
| | | GAGGATCGGAGATCGTGATGACCCAGAGCCCTCTCTCCTTGCCCGT |
| | | GACTCCTGGGGAGCCCGCATCCATTTCATGCCGGAGCTCCCAGTCA |
| | | CTTCTCTACTCCAACGGCTATAACTACGTGGATTGGTACCTCCAAAA |
| | | GCCGGGCCAGAGCCCGCAGCTGCTGATCTACCTGGGCTCGAACAGG |
| | | GCCAGCGGAGTGCCTGACCGGTTCTCCGGGTCGGGAAGCGGGACCG |
| | | ACTTCAAGCTGCAAATCTCGAGAGTGGAGGCCGAGGACGTGGGAA |
| | | TCTACTACTGTATGCAGGGCCGCCAGTTTCCGTACTCGTTCGGACAG |
| | | GGCACCAAAGTGGAAATCAAGACCACTACCCCAGCACCGAGGCCA |
| | | CCCACCCCGGCTCCTACCATCGCCTCCCAGCCTCTGTCCCTGCGTCC |
| | | GGAGGCATGTAGACCCGCAGCTGGTGGGGCCGTGCATACCCGGGGT |
| | | CTTGACTTCGCCTGCGATATCTACATTTGGGCCCCTCTGGCTGGTAC |
| | | TTGCGGGGTCCTGCTGCTTTCACTCGTGATCACTCTTTACTGTAAGC |
| | | GCGGTCGGAAGAAGCTGCTGTACATCTTTAAGCAACCCTTCATGAG |
| | | GCCTGTGCAGACTACTCAAGAGGAGGACGGCTGTTCATGCCGGTTC |
| | | CCAGAGGAGGAGGAAGGCGGCTGCGAACTGCGCGTGAAATTCAGC |
| | | CGCAGCGCAGATGCTCCAGCCTACAAGCAGGGGCAGAACCAGCTCT |
| | | ACAACGAACTCAATCTTGGTCGGAGAGAGGAGTACGACGTGCTGG |
| | | ACAAGCGGAGAGGACGGGACCCAGAAATGGGCGGGAAGCCGCGCA |
| | | GAAAGAATCCCCAAGAGGGCCTGTACAACGAGCTCCAAAAGGATA |
| | | AGATGGCAGAAGCCTATAGCGAGATTGGTATGAAAGGGGAACGCA |
| | | GAAGAGGCAAAGGCCACGACGGACTGTACCAGGGACTCAGCACCG |
| | | CCACCAAGGACACCTATGACGCTCTTCACATGCAGGCCCTGCCGCC |
| | | TCGG |

139104

| | | |
|---|---|---|
| 139104-aa | 45 | EVQLLETGGGLVQPGGSLRLSCAVSGFALSNHGMSWVRRAPGKGLEW |
| ScFv domain | | VSGIVYSGSTYYAASVKGRFTISRDNSRNTLYLQMNSLRPEDTAIYYCS |
| | | AHGGESDVWGQGTTVTVSSASGGGGSGGRASGGGGSEIVLTQSPATLS |
| | | VSPGESATLSCRASQSVSSNLAWYQQKPGQAPRLLIYGASTRASGIPDR |
| | | FSGSGSGTDFTLTISSLQAEDVAVYYCQQYGSSLTFGGGTKVEIK |
| 139104-nt | 60 | GAAGTGCAATTGCTCGAAACTGGAGGAGGTCTGGTGCAACCTGGAG |
| ScFv domain | | GATCACTTCGCCTGTCCTGCGCCGTGTCGGGCTTTGCCCTGTCCAAC |
| | | CATGGAATGAGCTGGGTCCGCCGCGCGCCGGGGAAGGGCCTCGAA |
| | | TGGGTGTCCGGCATCGTCTACTCCGGCTCCACCTACTACGCCGCGTC |
| | | CGTGAAGGGCCGGTTCACGATTTCACGGGACAACTCGCGGAACACC |
| | | CTGTACCTCCAAATGAATTCCCTTCGGCCGGAGGATACTGCCATCTA |
| | | CTACTGCTCCGCCCACGGTGGCGAATCCGACGTCTGGGGCCAGGGA |
| | | ACCACCGTGACCGTGTCCAGCGCGTCCGGGGGAGGAGGAAGCGGG |
| | | GGTAGAGCATCGGGTGGAGGCGGATCAGAGATCGTGCTGACCCAG |
| | | TCCCCCGCCACCTTGAGCGTGTCACCAGGAGAGTCCGCCACCCTGT |
| | | CATGCCGCGCCAGCCAGTCCGTGTCCTCCAACCTGGCTTGGTACCA |
| | | GCAGAAGCCGGGGCAGGCCCCTAGACTCCTGATCTATGGGGCGTCG |
| | | ACCCGGGCATCTGGAATTCCCGATAGGTTCAGCGGATCGGGCTCGG |
| | | GCACTGACTTCACTCTGACCATCTCCTCGCTGCAAGCCGAGGACGT |
| | | GGCTGTGTACTACTGTCAGCAGTACGGAAGCTCCCTGACTTTCGGT |
| | | GGCGGGACCAAAGTCGAGATTAAG |
| 139104-aa | 75 | EVQLLETGGGLVQPGGSLRLSCAVSGFALSNHGMSWVRRAPGKGLEW |
| VH | | VSGIVYSGSTYYAASVKGRFTISRDNSRNTLYLQMNSLRPEDTAIYYCS |
| | | AHGGESDVWGQGTTVTVSS |
| 139104-aa | 90 | EIVLTQSPATLSVSPGESATLSCRASQSVSSNLAWYQQKPGQAPRLLIY |
| VL | | GASTRASGIPDRFSGSGSGTDFTLTISSLQAEDVAVYYCQQYGSSLTFG |
| | | GGTKVEIK |
| 139104-aa | 105 | MALPVTALLLPLALLLHAARPEVQLLETGGGLVQPGGSLRLSCAVSGF |
| Full CAR | | ALSNHGMSWVRRAPGKGLEWVSGIVYSGSTYYAASVKGRFTISRDNS |
| | | RNTLYLQMNSLRPEDTAIYYCSAHGGESDVWGQGTTVTVSSASGGGG |
| | | SGGRASGGGGSEIVLTQSPATLSVSPGESATLSCRASQSVSSNLAWYQQ |
| | | KPGQAPRLLIYGASTRASGIPDRFSGSGSGTDFTLTISSLQAEDVAVYYC |
| | | QQYGSSLTFGGGTKVEIKTTTPAPRPPTPAPTIASQPLSLRPEACRPAAG |
| | | GAVHTRGLDFACDIYIWAPLAGTCGVLLLSLVITLYCKRGRKKLLYIFK |
| | | QPFMRPVQTTQEEDGCSCRFPEEEEGGCELRVKFSRSADAPAYKQGQN |
| | | QLYNELNLGRREEYDVLDKRRGRDPEMGGKPRRKNPQEGLYNELQK |
| | | DKMAEAYSEIGMKGERRRGKGHDGLYQGLSTATKDTYDALHMQALP |
| | | PR |
| 139104-nt | 120 | ATGGCCCTCCCTGTCACCGCCCTGCTGCTTCCGCTGGCTCTTCTGCT |
| Full CAR | | CCACGCCGCTCGGCCCGAAGTGCAATTGCTCGAAACTGGAGGAGGT |
| | | CTGGTGCAACCTGGAGGATCACTTCGCCTGTCCTGCGCCGTGTCGG |
| | | GCTTTGCCCTGTCCAACCATGGAATGAGCTGGGTCCGCCGCGCGCC |
| | | GGGGAAGGGCCTCGAATGGGTGTCCGGCATCGTCTACTCCGGCTCC |
| | | ACCTACTACGCCGCGTCCGTGAAGGGCCGGTTCACGATTTCACGGG |
| | | ACAACTCGCGGAACACCCTGTACCTCCAAATGAATTCCCTTCGGCC |
| | | GGAGGATACTGCCATCTACTACTGCTCCGCCCACGGTGGCGAATCC |
| | | GACGTCTGGGGCCAGGGAACCACCGTGACCGTGTCCAGCGCGTCCG |
| | | GGGGAGGAGGAAGCGGGGGTAGAGCATCGGGTGGAGGCGGATCAG |
| | | AGATCGTGCTGACCCAGTCCCCCGCCACCTTGAGCGTGTCACCAGG |
| | | AGAGTCCGCCACCCTGTCATGCCGCGCCAGCCAGTCCGTGTCCTCC |
| | | AACCTGGCTTGGTACCAGCAGAAGCCGGGGCAGGCCCCTAGACTCC |
| | | TGATCTATGGGGCGTCGACCCGGGCATCTGGAATTCCCGATAGGTT |
| | | CAGCGGATCGGGCTCGGGCACTGACTTCACTCTGACCATCTCCTCG |
| | | CTGCAAGCCGAGGACGTGGCTGTGTACTACTGTCAGCAGTACGGAA |
| | | GCTCCCTGACTTTCGGTGGCGGGACCAAAGTCGAGATTAAGACCAC |
| | | TACCCCAGCACCGAGGCCACCCACCCCGGCTCCTACCATCGCCTCC |
| | | CAGCCTCTGTCCCTGCGTCCGGAGGCATGTAGACCCGCAGCTGGTG |
| | | GGGCCGTGCATACCCGGGGTCTTGACTTCGCCTGCGATATCTACATT |
| | | TGGGCCCCTCTGGCTGGTACTTGCGGGGTCCTGCTGCTTTCACTCGT |
| | | GATCACTCTTTACTGTAAGCGCGGTCGGAAGAAGCTGCTGTACATC |
| | | TTTAAGCAACCCTTCATGAGGCCTGTGCAGACTACTCAAGAGGAGG |
| | | ACGGCTGTTCATGCCGGTTCCCAGAGGAGGAGGAAGGCGGCTGCG |
| | | AACTGCGCGTGAAATTCAGCCGCAGCGCAGATGCTCCAGCCTACAA |
| | | GCAGGGGCAGAACCAGCTCTACAACGAACTCAATCTTGGTCGGAGA |
| | | GAGGAGTACGACGTGCTGGACAAGCGGAGAGGACGGGACCCAGAA |
| | | ATGGGCGGGAAGCCGCGCAGAAAGAATCCCCAAGAGGGCCTGTAC |
| | | AACGAGCTCCAAAAGGATAAGATGGCAGAAGCCTATAGCGAGATT |
| | | GGTATGAAAGGGGAACGCAGAAGAGGCAAAGGCCACGACGGACTG |
| | | TACCAGGGACTCAGCACCGCCACCAAGGACACCTATGACGCTCTTC |
| | | ACATGCAGGCCCTGCCGCCTCGG |

139106

| | | |
|---|---|---|
| 139106-aa | 46 | EVQLVETGGGLVQPGGSLRLSCAVSGFALSNHGMSWVRRAPGKGLE |
| ScFv domain | | WVSGIVYSGSTYYAASVKGRFTISRDNSRNTLYLQMNSLRPEDTAIYY |
| | | CSAHGGESDVWGQGTTVTVSSASGGGGSGGRASGGGGSEIVMTQSPA |
| | | TLSVSPGERATLSCRASQSVSSKLAWYQQKPGQAPRLLMYGASIRATG |
| | | IPDRFSGSGSGTEFTLTISSLEPEDFAVYYCQQYGSSSWTFGQGTKVEIK |
| 139106-nt | 61 | GAAGTGCAATTGGTGGAAACTGGAGGAGGACTTGTGCAACCTGGA |
| ScFv domain | | GGATCATTGAGACTGAGCTGCGCAGTGTCGGGATTCGCCCTGAGCA |
| | | ACCATGGAATGTCCTGGGTCAGAAGGGCCCCTGGAAAAGGCCTCGA |
| | | ATGGGTGTCAGGGATCGTGTACTCCGGTTCCACTTACTACGCCGCCT |
| | | CCGTGAAGGGGCGCTTCACTATCTCACGGGATAACTCCCGCAATAC |
| | | CCTGTACCTCCAAATGAACAGCCTGCGGCCGGAGGATACCGCCATC |
| | | TACTACTGTTCCGCCCACGGTGGAGAGTCTGACGTCTGGGGCCAGG |
| | | GAACTACCGTGACCGTGTCCTCCGCGTCCGGCGGTGGAGGGAGCGG |
| | | CGGCCGCGCCAGCGGCGGCGGAGGCTCCGAGATCGTGATGACCCA |
| | | GAGCCCCGCTACTCTGTCGGTGTCGCCCGGAGAAAGGGCGACCCTG |
| | | TCCTGCCGGGCGTCGCAGTCCGTGAGCAGCAAGCTGGCTTGGTACC |
| | | AGCAGAAGCCGGGCCAGGCACCACGCCTGCTTATGTACGGTGCCTC |
| | | CATTCGGGCCACCGGAATCCCGGACCGGTTCTCGGGGTCGGGGTCC |
| | | GGTACCGAGTTCACACTGACCATTTCCTCGCTCGAGCCCGAGGACT |
| | | TTGCCGTCTATTACTGCCAGCAGTACGGCTCCTCCTCATGGACGTTC |
| | | GGCCAGGGGACCAAGGTCGAAATCAAG |
| 139106-aa | 76 | EVQLVETGGGLVQPGGSLRLSCAVSGFALSNHGMSWVRRAPGKGLE |
| VH | | WVSGIVYSGSTYYAASVKGRFTISRDNSRNTLYLQMNSLRPEDTAIYY |
| | | CSAHGGESDVWGQGTTVTVSS |
| 139106-aa | 91 | EIVMTQSPATLSVSPGERATLSCRASQSVSSKLAWYQQKPGQAPRLLM |
| VL | | YGASIRATGIPDRFSGSGSGTEFTLTISSLEPEDFAVYYCQQYGSSSWTF |
| | | GQGTKVEIK |
| 139106-aa | 106 | MALPVTALLLPLALLLHAARPEVQLVETGGGLVQPGGSLRLSCAVSGF |
| Full CAR | | ALSNHGMSWVRRAPGKGLEWVSGIVYSGSTYYAASVKGRFTISRDNS |
| | | RNTLYLQMNSLRPEDTAIYYCSAHGGESDVWGQGTTVTVSSASGGGG |
| | | SGGRASGGGGSEIVMTQSPATLSVSPGERATLSCRASQSVSSKLAWYQ |
| | | QKPGQAPRLLMYGASIRATGIPDRFSGSGSGTEFTLTISSLEPEDFAVYY |
| | | CQQYGSSSWTFGQGTKVEIKTTTPAPRPPTPAPTIASQPLSLRPEACRPA |
| | | AGGAVHTRGLDFACDIYIWAPLAGTCGVLLLSLVITLYCKRGRKKLLY |
| | | IFKQPFMRPVQTTQEEDGCSCRFPEEEEGGCELRVKFSRSADAPAYKQ |
| | | GQNQLYNELNLGRREEYDVLDKRRGRDPEMGGKPRRKNPQEGLYNE |
| | | LQKDKMAEAYSEIGMKGERRRGKGHDGLYQGLSTATKDTYDALHMQ |
| | | ALPPR |
| 139106-nt | 121 | ATGGCCCTCCCTGTCACCGCCCTGCTGCTTCCGCTGGCTCTTCTGCT |
| Full CAR | | CCACGCCGCTCGGCCCGAAGTGCAATTGGTGGAAACTGGAGGAGG |
| | | ACTTGTGCAACCTGGAGGATCATTGAGACTGAGCTGCGCAGTGTCG |
| | | GGATTCGCCCTGAGCAACCATGGAATGTCCTGGGTCAGAAGGGCCC |
| | | CTGGAAAAGGCCTCGAATGGGTGTCAGGGATCGTGTACTCCGGTTC |
| | | CACTTACTACGCCGCCTCCGTGAAGGGGCGCTTCACTATCTCACGG |
| | | GATAACTCCCGCAATACCCTGTACCTCCAAATGAACAGCCTGCGGC |
| | | CGGAGGATACCGCCATCTACTACTGTTCCGCCCACGGTGGAGAGTC |
| | | TGACGTCTGGGGCCAGGGAACTACCGTGACCGTGTCCTCCGCGTCC |
| | | GGCGGTGGAGGGAGCGGCGGCCGCGCCAGCGGCGGCGGAGGCTCC |
| | | GAGATCGTGATGACCCAGAGCCCCGCTACTCTGTCGGTGTCGCCCG |
| | | GAGAAAGGGCGACCCTGTCCTGCCGGGCGTCGCAGTCCGTGAGCAG |
| | | CAAGCTGGCTTGGTACCAGCAGAAGCCGGGCCAGGCACCACGCCTG |
| | | CTTATGTACGGTGCCTCCATTCGGGCCACCGGAATCCCGGACCGGT |
| | | TCTCGGGGTCGGGGTCCGGTACCGAGTTCACACTGACCATTTCCTCG |
| | | CTCGAGCCCGAGGACTTTGCCGTCTATTACTGCCAGCAGTACGGCT |
| | | CCTCCTCATGGACGTTCGGCCAGGGGACCAAGGTCGAAATCAAGAC |
| | | CACTACCCCAGCACCGAGGCCACCCACCCCGGCTCCTACCATCGCC |
| | | TCCCAGCCTCTGTCCCTGCGTCCGGAGGCATGTAGACCCGCAGCTG |
| | | GTGGGGCCGTGCATACCCGGGGTCTTGACTTCGCCTGCGATATCTA |
| | | CATTTGGGCCCCTCTGGCTGGTACTTGCGGGGTCCTGCTGCTTTCAC |
| | | TCGTGATCACTCTTTACTGTAAGCGCGGTCGGAAGAAGCTGCTGTA |
| | | CATCTTTAAGCAACCCTTCATGAGGCCTGTGCAGACTACTCAAGAG |
| | | GAGGACGGCTGTTCATGCCGGTTCCCAGAGGAGGAGGAAGGCGGC |
| | | TGCGAACTGCGCGTGAAATTCAGCCGCAGCGCAGATGCTCCAGCCT |
| | | ACAAGCAGGGGCAGAACCAGCTCTACAACGAACTCAATCTTGGTCG |
| | | GAGAGAGGAGTACGACGTGCTGGACAAGCGGAGAGGACGGGACCC |
| | | AGAAATGGGCGGGAAGCCGCGCAGAAAGAATCCCCAAGAGGGCCT |
| | | GTACAACGAGCTCCAAAAGGATAAGATGGCAGAAGCCTATAGCGA |
| | | GATTGGTATGAAAGGGGAACGCAGAAGAGGCAAAGGCCACGACGG |
| | | ACTGTACCAGGGACTCAGCACCGCCACCAAGGACACCTATGACGCT |
| | | CTTCACATGCAGGCCCTGCCGCCTCGG |

139107

| | | |
|---|---|---|
| 139107-aa | 47 | EVQLVETGGGVVQPGGSLRLSCAVSGFALSNHGMSWVRRAPGKGLE |
| ScFv domain | | WVSGIVYSGSTYYAASVKGRFTISRDNSRNTLYLQMNSLRPEDTAIYY |
| | | CSAHGGESDVWGQGTTVTVSSASGGGGSGGRASGGGGSEIVLTQSPG |
| | | TLSLSPGERATLSCRASQSVGSTNLAWYQQKPGQAPRLLIYDASNRAT |
| | | GIPDRFSGGGSGTDFTLTISRLEPEDFAVYYCQQYGSSPPWTFGQGTKV |
| | | EIK |
| 139107-nt | 62 | GAAGTGCAATTGGTGGAGACTGGAGGAGGAGTGGTGCAACCTGGA |
| ScFv domain | | GGAAGCCTGAGACTGTCATGCGCGGTGTCGGGCTTCGCCCTCTCCA |
| | | ACCACGGAATGTCCTGGGTCCGCCGGGCCCCTGGGAAAGGACTTGA |
| | | ATGGGTGTCCGGCATCGTGTACTCGGGTTCCACCTACTACGCGGCCT |
| | | CAGTGAAGGGCCGGTTTACTATTAGCCGCGACAACTCCAGAAACAC |
| | | ACTGTACCTCCAAATGAACTCGCTGCGGCCGGAAGATACCGCTATC |
| | | TACTACTGCTCCGCCCATGGGGGAGAGTCGGACGTCTGGGGACAGG |
| | | GCACCACTGTCACTGTGTCCAGCGCTTCCGGCGGTGGTGGAAGCGG |
| | | GGGACGGGCCTCAGGAGGCGGTGGCAGCGAGATTGTGCTGACCCA |
| | | GTCCCCCGGGACCCTGAGCCTGTCCCCGGGAGAAAGGGCCACCCTC |
| | | TCCTGTCGGGCATCCCAGTCCGTGGGGTCTACTAACCTTGCATGGTA |
| | | CCAGCAGAAGCCCGGCCAGGCCCCTCGCCTGCTGATCTACGACGCG |
| | | TCCAATAGAGCCACCGGCATCCCGGATCGCTTCAGCGGAGGCGGAT |
| | | CGGGCACCGACTTCACCCTCACCATTTCAAGGCTGGAACCGGAGGA |
| | | CTTCGCCGTGTACTACTGCCAGCAGTATGGTTCGTCCCCACCCTGGA |
| | | CGTTCGGCCAGGGGACTAAGGTCGAGATCAAG |
| 139107-aa | 77 | EVQLVETGGGVVQPGGSLRLSCAVSGFALSNHGMSWVRRAPGKGLE |
| VH | | WVSGIVYSGSTYYAASVKGRFTISRDNSRNTLYLQMNSLRPEDTAIYY |
| | | CSAHGGESDVWGQGTTVTVSS |
| 139107-aa | 92 | EIVLTQSPGTLSLSPGERATLSCRASQSVGSTNLAWYQQKPGQAPRLLI |
| VL | | YDASNRATGIPDRFSGGGSGTDFTLTISRLEPEDFAVYYCQQYGSSPPW |
| | | TFGQGTKVEIK |
| 139107-aa | 107 | MALPVTALLLPLALLLHAARPEVQLVETGGGVVQPGGSLRLSCAVSGF |
| Full CAR | | ALSNHGMSWVRRAPGKGLEWVSGIVYSGSTYYAASVKGRFTISRDNS |
| | | RNTLYLQMNSLRPEDTAIYYCSAHGGESDVWGQGTTVTVSSASGGGG |
| | | SGGRASGGGGSEIVLTQSPGTLSLSPGERATLSCRASQSVGSTNLAWYQ |
| | | QKPGQAPRLLIYDASNRATGIPDRFSGGGSGTDFTLTISRLEPEDFAVYY |
| | | CQQYGSSPPWTFGQGTKVEIKTTTPAPRPPTPAPTIASQPLSLRPEACRP |
| | | AAGGAVHTRGLDFACDIYIWAPLAGTCGVLLLSLVITLYCKRGRKKLL |
| | | YIFKQPFMRPVQTTQEEDGCSCRFPEEEEGGCELRVKFSRSADAPAYK |
| | | QGQNQLYNELNLGRREEYDVLDKRRGRDPEMGGKPRRKNPQEGLYN |
| | | ELQKDKMAEAYSEIGMKGERRRGKGHDGLYQGLSTATKDTYDALHM |
| | | QALPPR |
| 139107-nt | 122 | ATGGCCCTCCCTGTCACCGCCCTGCTGCTTCCGCTGGCTCTTCTGCT |
| Full CAR | | CCACGCCGCTCGGCCCGAAGTGCAATTGGTGGAGACTGGAGGAGG |
| | | AGTGGTGCAACCTGGAGGAAGCCTGAGACTGTCATGCGCGGTGTCG |
| | | GGCTTCGCCCTCTCCAACCACGGAATGTCCTGGGTCCGCCGGGCCC |
| | | CTGGGAAAGGACTTGAATGGGTGTCCGGCATCGTGTACTCGGGTTC |
| | | CACCTACTACGCGGCCTCAGTGAAGGGCCGGTTTACTATTAGCCGC |
| | | GACAACTCCAGAAACACACTGTACCTCCAAATGAACTCGCTGCGGC |
| | | CGGAAGATACCGCTATCTACTACTGCTCCGCCCATGGGGGAGAGTC |
| | | GGACGTCTGGGGACAGGGCACCACTGTCACTGTGTCCAGCGCTTCC |
| | | GGCGGTGGTGGAAGCGGGGGACGGGCCTCAGGAGGCGGTGGCAGC |
| | | GAGATTGTGCTGACCCAGTCCCCCGGGACCCTGAGCCTGTCCCCGG |
| | | GAGAAAGGGCCACCCTCTCCTGTCGGGCATCCCAGTCCGTGGGGTC |
| | | TACTAACCTTGCATGGTACCAGCAGAAGCCCGGCCAGGCCCCTCGC |
| | | CTGCTGATCTACGACGCGTCCAATAGAGCCACCGGCATCCCGGATC |
| | | GCTTCAGCGGAGGCGGATCGGGCACCGACTTCACCCTCACCATTTC |
| | | AAGGCTGGAACCGGAGGACTTCGCCGTGTACTACTGCCAGCAGTAT |
| | | GGTTCGTCCCCACCCTGGACGTTCGGCCAGGGGACTAAGGTCGAGA |
| | | TCAAGACCACTACCCCAGCACCGAGGCCACCCACCCCGGCTCCTAC |
| | | CATCGCCTCCCAGCCTCTGTCCCTGCGTCCGGAGGCATGTAGACCC |
| | | GCAGCTGGTGGGGCCGTGCATACCCGGGGTCTTGACTTCGCCTGCG |
| | | ATATCTACATTTGGGCCCCTCTGGCTGGTACTTGCGGGGTCCTGCTG |
| | | CTTTCACTCGTGATCACTCTTTACTGTAAGCGCGGTCGGAAGAAGCT |
| | | GCTGTACATCTTTAAGCAACCCTTCATGAGGCCTGTGCAGACTACTC |
| | | AAGAGGAGGACGGCTGTTCATGCCGGTTCCCAGAGGAGGAGGAAG |
| | | GCGGCTGCGAACTGCGCGTGAAATTCAGCCGCAGCGCAGATGCTCC |
| | | AGCCTACAAGCAGGGGCAGAACCAGCTCTACAACGAACTCAATCTT |
| | | GGTCGGAGAGAGGAGTACGACGTGCTGGACAAGCGGAGAGGACGG |
| | | GACCCAGAAATGGGCGGGAAGCCGCGCAGAAAGAATCCCCAAGAG |
| | | GGCCTGTACAACGAGCTCCAAAAGGATAAGATGGCAGAAGCCTAT |
| | | AGCGAGATTGGTATGAAAGGGGAACGCAGAAGAGGCAAAGGCCAC |
| | | GACGGACTGTACCAGGGACTCAGCACCGCCACCAAGGACACCTATG |
| | | ACGCTCTTCACATGCAGGCCCTGCCGCCTCGG |

139108

| | | |
|---|---|---|
| 139108-aa | 48 | QVQLVESGGGLVKPGGSLRLSCAASGFTFSDYYMSWIRQAPGKGLEW |
| ScFv domain | | VSYISSSGSTIYYADSVKGRFTISRDNAKNSLYLQMNSLRAEDTAVYYC |
| | | ARESGDGMDVWGQGTTVTVSSASGGGGSGGRASGGGGSDIQMTQSPS |
| | | SLSASVGDRVTITCRASQSISSYLNWYQQKPGKAPKLLIYAASSLQSGV |
| | | PSRFSGSGSGTDFTLTISSLQPEDFATYYCQQSYTLAFGQGTKVDIK |
| 139108-nt | 63 | CAAGTGCAACTCGTGGAATCTGGTGGAGGACTCGTGAAACCTGGAG |
| ScFv domain | | GATCATTGAGACTGTCATGCGCGGCCTCGGGATTCACGTTCTCCGAT |
| | | TACTACATGAGCTGGATTCGCCAGGCTCCGGGGAAGGGACTGGAAT |
| | | GGGTGTCCTACATTTCCTCATCCGGCTCCACCATCTACTACGCGGAC |
| | | TCCGTGAAGGGGAGATTCACCATTAGCCGCGATAACGCCAAGAACA |
| | | GCCTGTACCTTCAGATGAACTCCCTGCGGGCTGAAGATACTGCCGT |
| | | CTACTACTGCGCAAGGGAGAGCGGAGATGGGATGGACGTCTGGGG |
| | | ACAGGGTACCACTGTGACCGTGTCGTCGGCCTCCGGCGGAGGGGGT |
| | | TCGGGTGGAAGGGCCAGCGGCGGCGGAGGCAGCGACATCCAGATG |
| | | ACCCAGTCCCCCTCATCGCTGTCCGCCTCCGTGGGCGACCGCGTCAC |
| | | CATCACATGCCGGGCCTCACAGTCGATCTCCTCCTACCTCAATTGGT |
| | | ATCAGCAGAAGCCCGGAAAGGCCCCTAAGCTTCTGATCTACGCAGC |
| | | GTCCTCCCTGCAATCCGGGGTCCCATCTCGGTTCTCCGGCTCGGGCA |
| | | GCGGTACCGACTTCACTCTGACCATCTCGAGCCTGCAGCCGGAGGA |
| | | CTTCGCCACTTACTACTGTCAGCAAAGCTACACCCTCGCGTTTGGCC |
| | | AGGGCACCAAAGTGGACATCAAG |
| 139108-aa | 78 | QVQLVESGGGLVKPGGSLRLSCAASGFTFSDYYMSWIRQAPGKGLEW |
| VH | | VSYISSSGSTIYYADSVKGRFTISRDNAKNSLYLQMNSLRAEDTAVYYC |
| | | ARESGDGMDVWGQGTTVTVSS |
| 139108-aa | 93 | DIQMTQSPSSLSASVGDRVTITCRASQSISSYLNWYQQKPGKAPKLLIY |
| VL | | AASSLQSGVPSRFSGSGSGTDFTLTISSLQPEDFATYYCQQSYTLAFGQ |
| | | GTKVDIK |
| 139108-aa | 108 | MALPVTALLLPLALLLHAARPQVQLVESGGGLVKPGGSLRLSCAASGF |
| Full CAR | | TFSDYYMSWIRQAPGKGLEWVSYISSSGSTIYYADSVKGRFTISRDNAK |
| | | NSLYLQMNSLRAEDTAVYYCARESGDGMDVWGQGTTVTVSSASGGG |
| | | GSGGRASGGGGSDIQMTQSPSSLSASVGDRVTITCRASQSISSYLNWYQ |
| | | QKPGKAPKLLIYAASSLQSGVPSRFSGSGSGTDFTLTISSLQPEDFATYY |
| | | CQQSYTLAFGQGTKVDIKTTTPAPRPPTPAPTIASQPLSLRPEACRPAAG |
| | | GAVHTRGLDFACDIYIWAPLAGTCGVLLLSLVITLYCKRGRKKLLYIFK |
| | | QPFMRPVQTTQEEDGCSCRFPEEEEGGCELRVKFSRSADAPAYKQGQN |
| | | QLYNELNLGRREEYDVLDKRRGRDPEMGGKPRRKNPQEGLYNELQK |
| | | DKMAEAYSEIGMKGERRRGKGHDGLYQGLSTATKDTYDALHMQALP |
| | | PR |
| 139108-nt | 123 | ATGGCCCTCCCTGTCACCGCCCTGCTGCTTCCGCTGGCTCTTCTGCT |
| Full CAR | | CCACGCCGCTCGGCCCCAAGTGCAACTCGTGGAATCTGGTGGAGGA |
| | | CTCGTGAAACCTGGAGGATCATTGAGACTGTCATGCGCGGCCTCGG |
| | | GATTCACGTTCTCCGATTACTACATGAGCTGGATTCGCCAGGCTCCG |
| | | GGGAAGGGACTGGAATGGGTGTCCTACATTTCCTCATCCGGCTCCA |
| | | CCATCTACTACGCGGACTCCGTGAAGGGGAGATTCACCATTAGCCG |
| | | CGATAACGCCAAGAACAGCCTGTACCTTCAGATGAACTCCCTGCGG |
| | | GCTGAAGATACTGCCGTCTACTACTGCGCAAGGGAGAGCGGAGATG |
| | | GGATGGACGTCTGGGGACAGGGTACCACTGTGACCGTGTCGTCGGC |
| | | CTCCGGCGGAGGGGGTTCGGGTGGAAGGGCCAGCGGCGGCGGAGG |
| | | CAGCGACATCCAGATGACCCAGTCCCCCTCATCGCTGTCCGCCTCC |
| | | GTGGGCGACCGCGTCACCATCACATGCCGGGCCTCACAGTCGATCT |
| | | CCTCCTACCTCAATTGGTATCAGCAGAAGCCCGGAAAGGCCCCTAA |
| | | GCTTCTGATCTACGCAGCGTCCTCCCTGCAATCCGGGGTCCCATCTC |
| | | GGTTCTCCGGCTCGGGCAGCGGTACCGACTTCACTCTGACCATCTCG |
| | | AGCCTGCAGCCGGAGGACTTCGCCACTTACTACTGTCAGCAAAGCT |
| | | ACACCCTCGCGTTTGGCCAGGGCACCAAAGTGGACATCAAGACCAC |
| | | TACCCCAGCACCGAGGCCACCCACCCCGGCTCCTACCATCGCCTCC |
| | | CAGCCTCTGTCCCTGCGTCCGGAGGCATGTAGACCCGCAGCTGGTG |
| | | GGGCCGTGCATACCCGGGGTCTTGACTTCGCCTGCGATATCTACATT |
| | | TGGGCCCCTCTGGCTGGTACTTGCGGGGTCCTGCTGCTTTCACTCGT |
| | | GATCACTCTTTACTGTAAGCGCGGTCGGAAGAAGCTGCTGTACATC |
| | | TTTAAGCAACCCTTCATGAGGCCTGTGCAGACTACTCAAGAGGAGG |
| | | ACGGCTGTTCATGCCGGTTCCCAGAGGAGGAGGAAGGCGGCTGCG |
| | | AACTGCGCGTGAAATTCAGCCGCAGCGCAGATGCTCCAGCCTACAA |
| | | GCAGGGGCAGAACCAGCTCTACAACGAACTCAATCTTGGTCGGAGA |
| | | GAGGAGTACGACGTGCTGGACAAGCGGAGAGGACGGGACCCAGAA |
| | | ATGGGCGGGAAGCCGCGCAGAAAGAATCCCCAAGAGGGCCTGTAC |
| | | AACGAGCTCCAAAAGGATAAGATGGCAGAAGCCTATAGCGAGATT |
| | | GGTATGAAAGGGGAACGCAGAAGAGGCAAAGGCCACGACGGACTG |
| | | TACCAGGGACTCAGCACCGCCACCAAGGACACCTATGACGCTCTTC |
| | | ACATGCAGGCCCTGCCGCCTCGG |

139110

| | | |
|---|---|---|
| 139110-aa | 50 | QVQLVQSGGGLVKPGGSLRLSCAASGFTFSDYYMSWIRQAPGKGLEW |
| ScFv domain | | VSYISSSGNTIYYADSVKGRFTISRDNAKNSLYLQMNSLRAEDTAVYY |
| | | CARSTMVREDYWGQGTLVTVSSASGGGGSGGRASGGGGSDIVLTQSP |
| | | LSLPVTLGQPASISCKSSESLVHNSGKTYLNWFHQRPGQSPRRLIYEVS |
| | | NRDSGVPDRFTGSGSGTDFTLKISRVEAEDVGVYYCMQGTHWPGTFG |
| | | QGTKLEIK |
| 139110-nt | 65 | CAAGTGCAACTGGTGCAAAGCGGAGGAGGATTGGTCAAACCCGGA |
| ScFv domain | | GGAAGCCTGAGACTGTCATGCGCGGCCTCTGGATTCACCTTCTCCG |
| | | ATTACTACATGTCATGGATCAGACAGGCCCCGGGGAAGGGCCTCGA |
| | | ATGGGTGTCCTACATCTCGTCCTCCGGGAACACCATCTACTACGCCG |
| | | ACAGCGTGAAGGGCCGCTTTACCATTTCCCGCGACAACGCAAAGAA |
| | | CTCGCTGTACCTTCAGATGAATTCCCTGCGGGCTGAAGATACCGCG |
| | | GTGTACTATTGCGCCCGGTCCACTATGGTCCGGGAGGACTACTGGG |
| | | GACAGGGCACACTCGTGACCGTGTCCAGCGCGAGCGGGGGTGGAG |
| | | GCAGCGGTGGACGCGCCTCCGGCGGCGGCGGTTCAGACATCGTGCT |
| | | GACTCAGTCGCCCCTGTCGCTGCCGGTCACCCTGGGCCAACCGGCC |
| | | TCAATTAGCTGCAAGTCCTCGGAGAGCCTGGTGCACAACTCAGGAA |
| | | AGACTTACCTGAACTGGTTCCATCAGCGGCCTGGACAGTCCCCACG |
| | | GAGGCTCATCTATGAAGTGTCCAACAGGGATTCGGGGGTGCCCGAC |
| | | CGCTTCACTGGCTCCGGGTCCGGCACCGACTTCACCTTGAAAATCTC |
| | | CAGAGTGGAAGCCGAGGACGTGGGCGTGTACTACTGTATGCAGGGT |
| | | ACCCACTGGCCTGGAACCTTTGGACAAGGAACTAAGCTCGAGATTA |
| | | AG |
| 139110-aa | 80 | QVQLVQSGGGLVKPGGSLRLSCAASGFTFSDYYMSWIRQAPGKGLEW |
| VH | | VSYISSSGNTIYYADSVKGRFTISRDNAKNSLYLQMNSLRAEDTAVYY |
| | | CARSTMVREDYWGQGTLVTVSS |
| 139110-aa | 95 | DIVLTQSPLSLPVTLGQPASISCKSSESLVHNSGKTYLNWFHQRPGQSPR |
| VL | | RLIYEVSNRDSGVPDRFTGSGSGTDFTLKISRVEAEDVGVYYCMQGTH |
| | | WPGTFGQGTKLEIK |
| 139110-aa | 110 | MALPVTALLLPLALLLHAARPQVQLVQSGGGLVKPGGSLRLSCAASGF |
| Full CAR | | TFSDYYMSWIRQAPGKGLEWVSYISSSGNTIYYADSVKGRFTISRDNA |
| | | KNSLYLQMNSLRAEDTAVYYCARSTMVREDYWGQGTLVTVSSASGG |
| | | GGSGGRASGGGGSDIVLTQSPLSLPVTLGQPASISCKSSESLVHNSGKT |
| | | YLNWFHQRPGQSPRRLIYEVSNRDSGVPDRFTGSGSGTDFTLKISRVEA |
| | | EDVGVYYCMQGTHWPGTFGQGTKLEIKTTTPAPRPPTPAPTIASQPLSL |
| | | RPEACRPAAGGAVHTRGLDFACDIYIWAPLAGTCGVLLLSLVITLYCK |
| | | RGRKKLLYIFKQPFMRPVQTTQEEDGCSCRFPEEEEGGCELRVKFSRSA |
| | | DAPAYKQGQNQLYNELNLGRREEYDVLDKRRGRDPEMGGKPRRKNP |
| | | QEGLYNELQKDKMAEAYSEIGMKGERRRGKGHDGLYQGLSTATKDT |
| | | YDALHMQALPPR |
| 139110-nt | 125 | ATGGCCCTCCCTGTCACCGCCCTGCTGCTTCCGCTGGCTCTTCTGCT |
| Full CAR | | CCACGCCGCTCGGCCCCAAGTGCAACTGGTGCAAAGCGGAGGAGG |
| | | ATTGGTCAAACCCGGAGGAAGCCTGAGACTGTCATGCGCGGCCTCT |
| | | GGATTCACCTTCTCCGATTACTACATGTCATGGATCAGACAGGCCCC |
| | | GGGGAAGGGCCTCGAATGGGTGTCCTACATCTCGTCCTCCGGGAAC |
| | | ACCATCTACTACGCCGACAGCGTGAAGGGCCGCTTTACCATTTCCC |
| | | GCGACAACGCAAAGAACTCGCTGTACCTTCAGATGAATTCCCTGCG |
| | | GGCTGAAGATACCGCGGTGTACTATTGCGCCCGGTCCACTATGGTC |
| | | CGGGAGGACTACTGGGGACAGGGCACACTCGTGACCGTGTCCAGC |
| | | GCGAGCGGGGGTGGAGGCAGCGGTGGACGCGCCTCCGGCGGCGGC |
| | | GGTTCAGACATCGTGCTGACTCAGTCGCCCCTGTCGCTGCCGGTCAC |
| | | CCTGGGCCAACCGGCCTCAATTAGCTGCAAGTCCTCGGAGAGCCTG |
| | | GTGCACAACTCAGGAAAGACTTACCTGAACTGGTTCCATCAGCGGC |
| | | CTGGACAGTCCCCACGGAGGCTCATCTATGAAGTGTCCAACAGGGA |
| | | TTCGGGGGTGCCCGACCGCTTCACTGGCTCCGGGTCCGGCACCGAC |
| | | TTCACCTTGAAAATCTCCAGAGTGGAAGCCGAGGACGTGGGCGTGT |
| | | ACTACTGTATGCAGGGTACCCACTGGCCTGGAACCTTTGGACAAGG |
| | | AACTAAGCTCGAGATTAAGACCACTACCCCAGCACCGAGGCCACCC |
| | | ACCCCGGCTCCTACCATCGCCTCCCAGCCTCTGTCCCTGCGTCCGGA |
| | | GGCATGTAGACCCGCAGCTGGTGGGGCCGTGCATACCCGGGGTCTT |
| | | GACTTCGCCTGCGATATCTACATTTGGGCCCCTCTGGCTGGTACTTG |
| | | CGGGGTCCTGCTGCTTTCACTCGTGATCACTCTTTACTGTAAGCGCG |
| | | GTCGGAAGAAGCTGCTGTACATCTTTAAGCAACCCTTCATGAGGCC |
| | | TGTGCAGACTACTCAAGAGGAGGACGGCTGTTCATGCCGGTTCCCA |
| | | GAGGAGGAGGAAGGCGGCTGCGAACTGCGCGTGAAATTCAGCCGC |
| | | AGCGCAGATGCTCCAGCCTACAAGCAGGGGCAGAACCAGCTCTAC |
| | | AACGAACTCAATCTTGGTCGGAGAGAGGAGTACGACGTGCTGGAC |
| | | AAGCGGAGAGGACGGGACCCAGAAATGGGCGGGAAGCCGCGCAG |
| | | AAAGAATCCCCAAGAGGGCCTGTACAACGAGCTCCAAAAGGATAA |
| | | GATGGCAGAAGCCTATAGCGAGATTGGTATGAAAGGGGAACGCAG |
| | | AAGAGGCAAAGGCCACGACGGACTGTACCAGGGACTCAGCACCGC |
| | | CACCAAGGACACCTATGACGCTCTTCACATGCAGGCCCTGCCGCCT |
| | | CGG |

139112

| | | |
|---|---|---|
| 139112-aa | 51 | QVQLVESGGGLVQPGGSLRLSCAVSGFALSNHGMSWVRRAPGKGLE |
| ScFv domain | | WVSGIVYSGSTYYAASVKGRFTISRDNSRNTLYLQMNSLRPEDTAIYY |
| | | CSAHGGESDVWGQGTTVTVSSASGGGGSGGRASGGGGSDIRLTQSPSP |
| | | LSASVGDRVTITCQASEDINKFLNWYHQTPGKAPKLLIYDASTLQTGVP |
| | | SRFSGSGSGTDFTLTINSLQPEDIGTYYCQQYESLPLTFGGGTKVEIK |
| 139112-nt | 66 | CAAGTGCAACTCGTGGAATCTGGTGGAGGACTCGTGCAACCCGGTG |
| ScFv domain | | GAAGCCTTAGGCTGTCGTGCGCCGTCAGCGGGTTTGCTCTGAGCAA |
| | | CCATGGAATGTCCTGGGTCCGCCGGGCACCGGGAAAAGGGCTGGA |
| | | ATGGGTGTCCGGCATCGTGTACAGCGGGTCAACCTATTACGCCGCG |
| | | TCCGTGAAGGGCAGATTCACTATCTCAAGAGACAACAGCCGGAACA |
| | | CCCTGTACTTGCAAATGAATTCCCTGCGCCCCGAGGACACCGCCAT |
| | | CTACTACTGCTCCGCCCACGGAGGAGAGTCGGACGTGTGGGGCCAG |
| | | GGAACGACTGTGACTGTGTCCAGCGCATCAGGAGGGGGTGGTTCGG |
| | | GCGGCCGGGCCTCGGGGGGAGGAGGTTCCGACATTCGGCTGACCCA |
| | | GTCCCCGTCCCCACTGTCGGCCTCCGTCGGCGACCGCGTGACCATC |
| | | ACTTGTCAGGCGTCCGAGGACATTAACAAGTTCCTGAACTGGTACC |
| | | ACCAGACCCCTGGAAAGGCCCCCAAGCTGCTGATCTACGATGCCTC |
| | | GACCCTTCAAACTGGAGTGCCTAGCCGGTTCTCCGGGTCCGGCTCC |
| | | GGCACTGATTTCACTCTGACCATCAACTCATTGCAGCCGGAAGATA |
| | | TCGGGACCTACTATTGCCAGCAGTACGAATCCCTCCCGCTCACATTC |
| | | GGCGGGGGAACCAAGGTCGAGATTAAG |
| 139112-aa | 81 | QVQLVESGGGLVQPGGSLRLSCAVSGFALSNHGMSWVRRAPGKGLE |
| VH | | WVSGIVYSGSTYYAASVKGRFTISRDNSRNTLYLQMNSLRPEDTAIYY |
| | | CSAHGGESDVWGQGTTVTVSS |
| 139112-aa | 96 | DIRLTQSPSPLSASVGDRVTITCQASEDINKFLNWYHQTPGKAPKLLIY |
| VL | | DASTLQTGVPSRFSGSGSGTDFTLTINSLQPEDIGTYYCQQYESLPLTFG |
| | | GGTKVEIK |
| 139112-aa | 111 | MALPVTALLLPLALLLHAARPQVQLVESGGGLVQPGGSLRLSCAVSGF |
| Full CAR | | ALSNHGMSWVRRAPGKGLEWVSGIVYSGSTYYAASVKGRFTISRDNS |
| | | RNTLYLQMNSLRPEDTAIYYCSAHGGESDVWGQGTTVTVSSASGGGG |
| | | SGGRASGGGGSDIRLTQSPSPLSASVGDRVTITCQASEDINKFLNWYHQ |
| | | TPGKAPKLLIYDASTLQTGVPSRFSGSGSGTDFTLTINSLQPEDIGTYYC |
| | | QQYESLPLTFGGGTKVEIKTTTPAPRPPTPAPTIASQPLSLRPEACRPAA |
| | | GGAVHTRGLDFACDIYIWAPLAGTCGVLLLSLVITLYCKRGRKKLLYIF |
| | | KQPFMRPVQTTQEEDGCSCRFPEEEEGGCELRVKFSRSADAPAYKQGQ |
| | | NQLYNELNLGRREEYDVLDKRRGRDPEMGGKPRRKNPQEGLYNELQ |
| | | KDKMAEAYSEIGMKGERRRGKGHDGLYQGLSTATKDTYDALHMQAL |
| | | PPR |
| 139112-nt | 126 | ATGGCCCTCCCTGTCACCGCCCTGCTGCTTCCGCTGGCTCTTCTGCT |
| Full CAR | | CCACGCCGCTCGGCCCCAAGTGCAACTCGTGGAATCTGGTGGAGGA |
| | | CTCGTGCAACCCGGTGGAAGCCTTAGGCTGTCGTGCGCCGTCAGCG |
| | | GGTTTGCTCTGAGCAACCATGGAATGTCCTGGGTCCGCCGGGCACC |
| | | GGGAAAAGGGCTGGAATGGGTGTCCGGCATCGTGTACAGCGGGTC |
| | | AACCTATTACGCCGCGTCCGTGAAGGGCAGATTCACTATCTCAAGA |
| | | GACAACAGCCGGAACACCCTGTACTTGCAAATGAATTCCCTGCGCC |
| | | CCGAGGACACCGCCATCTACTACTGCTCCGCCCACGGAGGAGAGTC |
| | | GGACGTGTGGGGCCAGGGAACGACTGTGACTGTGTCCAGCGCATCA |
| | | GGAGGGGGTGGTTCGGGCGGCCGGGCCTCGGGGGGAGGAGGTTCC |
| | | GACATTCGGCTGACCCAGTCCCCGTCCCCACTGTCGGCCTCCGTCGG |
| | | CGACCGCGTGACCATCACTTGTCAGGCGTCCGAGGACATTAACAAG |
| | | TTCCTGAACTGGTACCACCAGACCCCTGGAAAGGCCCCCAAGCTGC |
| | | TGATCTACGATGCCTCGACCCTTCAAACTGGAGTGCCTAGCCGGTTC |
| | | TCCGGGTCCGGCTCCGGCACTGATTTCACTCTGACCATCAACTCATT |
| | | GCAGCCGGAAGATATCGGGACCTACTATTGCCAGCAGTACGAATCC |
| | | CTCCCGCTCACATTCGGCGGGGGAACCAAGGTCGAGATTAAGACCA |
| | | CTACCCCAGCACCGAGGCCACCCACCCCGGCTCCTACCATCGCCTC |
| | | CCAGCCTCTGTCCCTGCGTCCGGAGGCATGTAGACCCGCAGCTGGT |
| | | GGGGCCGTGCATACCCGGGGTCTTGACTTCGCCTGCGATATCTACA |
| | | TTTGGGCCCCTCTGGCTGGTACTTGCGGGGTCCTGCTGCTTTCACTC |
| | | GTGATCACTCTTTACTGTAAGCGCGGTCGGAAGAAGCTGCTGTACA |
| | | TCTTTAAGCAACCCTTCATGAGGCCTGTGCAGACTACTCAAGAGGA |
| | | GGACGGCTGTTCATGCCGGTTCCCAGAGGAGGAGGAAGGCGGCTG |
| | | CGAACTGCGCGTGAAATTCAGCCGCAGCGCAGATGCTCCAGCCTAC |
| | | AAGCAGGGGCAGAACCAGCTCTACAACGAACTCAATCTTGGTCGGA |
| | | GAGAGGAGTACGACGTGCTGGACAAGCGGAGAGGACGGGACCCAG |
| | | AAATGGGCGGGAAGCCGCGCAGAAAGAATCCCCAAGAGGGCCTGT |
| | | ACAACGAGCTCCAAAAGGATAAGATGGCAGAAGCCTATAGCGAGA |
| | | TTGGTATGAAAGGGGAACGCAGAAGAGGCAAAGGCCACGACGGAC |
| | | TGTACCAGGGACTCAGCACCGCCACCAAGGACACCTATGACGCTCT |
| | | TCACATGCAGGCCCTGCCGCCTCGG |

139113

| | | |
|---|---|---|
| 139113-aa | 52 | EVQLVETGGGLVQPGGSLRLSCAVSGFALSNHGMSWVRRAPGKGLE |
| ScFv domain | | WVSGIVYSGSTYYAASVKGRFTISRDNSRNTLYLQMNSLRPEDTAIYY |
| | | CSAHGGESDVWGQGTTVTVSSASGGGGSGGRASGGGGSETTLTQSPA |
| | | TLSVSPGERATLSCRASQSVGSNLAWYQQKPGQGPRLLIYGASTRATGI |
| | | PARFSGSGSGTEFTLTISSLQPEDFAVYYCQQYNDWLPVTFGQGTKVEI |
| | | K |
| 139113-nt | 67 | GAAGTGCAATTGGTGGAAACTGGAGGAGGACTTGTGCAACCTGGA |
| ScFv domain | | GGATCATTGCGGCTCTCATGCGCTGTCTCCGGCTTCGCCCTGTCAAA |
| | | TCACGGGATGTCGTGGGTCAGACGGGCCCCGGGAAAGGGTCTGGA |
| | | ATGGGTGTCGGGGATTGTGTACAGCGGCTCCACCTACTACGCCGCT |
| | | TCGGTCAAGGGCCGCTTCACTATTTCACGGGACAACAGCCGCAACA |
| | | CCCTCTATCTGCAAATGAACTCTCTCCGCCCGGAGGATACCGCCATC |
| | | TACTACTGCTCCGCACACGGCGGCGAATCCGACGTGTGGGGACAGG |
| | | GAACCACTGTCACCGTGTCGTCCGCATCCGGTGGCGGAGGATCGGG |
| | | TGGCCGGGCCTCCGGGGGCGGCGGCAGCGAGACTACCCTGACCCA |
| | | GTCCCCTGCCACTCTGTCCGTGAGCCCGGGAGAGAGAGCCACCCTT |
| | | AGCTGCCGGGCCAGCCAGAGCGTGGGCTCCAACCTGGCCTGGTACC |
| | | AGCAGAAGCCAGGACAGGGTCCCAGGCTGCTGATCTACGGAGCCTC |
| | | CACTCGCGCGACCGGCATCCCCGCGAGGTTCTCCGGGTCGGGTTCC |
| | | GGGACCGAGTTCACCCTGACCATCTCCTCCCTCCAACCGGAGGACT |
| | | TCGCGGTGTACTACTGTCAGCAGTACAACGATTGGCTGCCCGTGAC |
| | | ATTTGGACAGGGGACGAAGGTGGAAATCAAA |
| 139113-aa | 82 | EVQLVETGGGLVQPGGSLRLSCAVSGFALSNHGMSWVRRAPGKGLE |
| VH | | WVSGIVYSGSTYYAASVKGRFTISRDNSRNTLYLQMNSLRPEDTAIYY |
| | | CSAHGGESDVWGQGTTVTVSS |
| 139113-aa | 97 | ETTLTQSPATLSVSPGERATLSCRASQSVGSNLAWYQQKPGQGPRLLIY |
| VL | | GASTRATGIPARFSGSGSGTEFTLTISSLQPEDFAVYYCQQYNDWLPVT |
| | | FGQGTKVEIK |
| 139113-aa | 112 | MALPVTALLLPLALLLHAARPEVQLVETGGGLVQPGGSLRLSCAVSGF |
| Full CAR | | ALSNHGMSWVRRAPGKGLEWVSGIVYSGSTYYAASVKGRFTISRDNS |
| | | RNTLYLQMNSLRPEDTAIYYCSAHGGESDVWGQGTTVTVSSASGGGG |
| | | SGGRASGGGGSETTLTQSPATLSVSPGERATLSCRASQSVGSNLAWYQ |
| | | QKPGQGPRLLIYGASTRATGIPARFSGSGSGTEFTLTISSLQPEDFAVYY |
| | | CQQYNDWLPVTFGQGTKVEIKTTTPAPRPPTPAPTIASQPLSLRPEACRP |
| | | AAGGAVHTRGLDFACDIYIWAPLAGTCGVLLLSLVITLYCKRGRKKLL |
| | | YIFKQPFMRPVQTTQEEDGCSCRFPEEEEGGCELRVKFSRSADAPAYK |
| | | QGQNQLYNELNLGRREEYDVLDKRRGRDPEMGGKPRRKNPQEGLYN |
| | | ELQKDKMAEAYSEIGMKGERRRGKGHDGLYQGLSTATKDTYDALHM |
| | | QALPPR |
| 139113-nt | 127 | ATGGCCCTCCCTGTCACCGCCCTGCTGCTTCCGCTGGCTCTTCTGCT |
| Full CAR | | CCACGCCGCTCGGCCCGAAGTGCAATTGGTGGAAACTGGAGGAGG |
| | | ACTTGTGCAACCTGGAGGATCATTGCGGCTCTCATGCGCTGTCTCCG |
| | | GCTTCGCCCTGTCAAATCACGGGATGTCGTGGGTCAGACGGGCCCC |
| | | GGGAAAGGGTCTGGAATGGGTGTCGGGGATTGTGTACAGCGGCTCC |
| | | ACCTACTACGCCGCTTCGGTCAAGGGCCGCTTCACTATTTCACGGG |
| | | ACAACAGCCGCAACACCCTCTATCTGCAAATGAACTCTCTCCGCCC |
| | | GGAGGATACCGCCATCTACTACTGCTCCGCACACGGCGGCGAATCC |
| | | GACGTGTGGGGACAGGGAACCACTGTCACCGTGTCGTCCGCATCCG |
| | | GTGGCGGAGGATCGGGTGGCCGGGCCTCCGGGGGCGGCGGCAGCG |
| | | AGACTACCCTGACCCAGTCCCCTGCCACTCTGTCCGTGAGCCCGGG |
| | | AGAGAGAGCCACCCTTAGCTGCCGGGCCAGCCAGAGCGTGGGCTCC |
| | | AACCTGGCCTGGTACCAGCAGAAGCCAGGACAGGGTCCCAGGCTG |
| | | CTGATCTACGGAGCCTCCACTCGCGCGACCGGCATCCCCGCGAGGT |
| | | TCTCCGGGTCGGGTTCCGGGACCGAGTTCACCCTGACCATCTCCTCC |
| | | CTCCAACCGGAGGACTTCGCGGTGTACTACTGTCAGCAGTACAACG |
| | | ATTGGCTGCCCGTGACATTTGGACAGGGGACGAAGGTGGAAATCAA |
| | | AACCACTACCCCAGCACCGAGGCCACCCACCCCGGCTCCTACCATC |
| | | GCCTCCCAGCCTCTGTCCCTGCGTCCGGAGGCATGTAGACCCGCAG |
| | | CTGGTGGGGCCGTGCATACCCGGGGTCTTGACTTCGCCTGCGATAT |
| | | CTACATTTGGGCCCCTCTGGCTGGTACTTGCGGGGTCCTGCTGCTTT |
| | | CACTCGTGATCACTCTTTACTGTAAGCGCGGTCGGAAGAAGCTGCT |
| | | GTACATCTTTAAGCAACCCTTCATGAGGCCTGTGCAGACTACTCAA |
| | | GAGGAGGACGGCTGTTCATGCCGGTTCCCAGAGGAGGAGGAAGGC |
| | | GGCTGCGAACTGCGCGTGAAATTCAGCCGCAGCGCAGATGCTCCAG |
| | | CCTACAAGCAGGGGCAGAACCAGCTCTACAACGAACTCAATCTTGG |
| | | TCGGAGAGAGGAGTACGACGTGCTGGACAAGCGGAGAGGACGGGA |
| | | CCCAGAAATGGGCGGGAAGCCGCGCAGAAAGAATCCCCAAGAGGG |
| | | CCTGTACAACGAGCTCCAAAAGGATAAGATGGCAGAAGCCTATAG |
| | | CGAGATTGGTATGAAAGGGGAACGCAGAAGAGGCAAAGGCCACGA |
| | | CGGACTGTACCAGGGACTCAGCACCGCCACCAAGGACACCTATGAC |
| | | GCTCTTCACATGCAGGCCCTGCCGCCTCGG |

139114

| | | |
|---|---|---|
| 139114-aa | 53 | EVQLVESGGGLVQPGGSLRLSCAVSGFALSNHGMSWVRRAPGKGLE |
| ScFv domain | | WVSGIVYSGSTYYAASVKGRFTISRDNSRNTLYLQMNSLRPEDTAIYY |
| | | CSAHGGESDVWGQGTTVTVSSASGGGGSGGRASGGGGSEIVLTQSPG |
| | | TLSLSPGERATLSCRASQSIGSSSLAWYQQKPGQAPRLLMYGASSRASG |
| | | IPDRFSGSGSGTDFTLTISRLEPEDFAVYYCQQYAGSPPFTFGQGTKVEI |
| | | K |
| 139114-nt | 68 | GAAGTGCAATTGGTGGAATCTGGTGGAGGACTTGTGCAACCTGGAG |
| ScFv domain | | GATCACTGAGACTGTCATGCGCGGTGTCCGGTTTTGCCCTGAGCAA |
| | | TCATGGGATGTCGTGGGTCCGGCGCGCCCCCGGAAAGGGTCTGGAA |
| | | TGGGTGTCGGGTATCGTCTACTCCGGGAGCACTTACTACGCCGCGA |
| | | GCGTGAAGGGCCGCTTCACCATTTCCCGCGATAACTCCCGCAACAC |
| | | CCTGTACTTGCAAATGAACTCGCTCCGGCCTGAGGACACTGCCATC |
| | | TACTACTGCTCCGCACACGGAGGAGAATCCGACGTGTGGGGCCAGG |
| | | GAACTACCGTGACCGTCAGCAGCGCCTCCGGCGGCGGGGGCTCAGG |
| | | CGGACGGGCTAGCGGCGGCGGTGGCTCCGAGATCGTGCTGACCCAG |
| | | TCGCCTGGCACTCTCTCGCTGAGCCCCGGGGAAAGGGCAACCCTGT |
| | | CCTGTCGGGCCAGCCAGTCCATTGGATCATCCTCCCTCGCCTGGTAT |
| | | CAGCAGAAACCGGGACAGGCTCCGCGGCTGCTTATGTATGGGGCCA |
| | | GCTCAAGAGCCTCCGGCATTCCCGACCGGTTCTCCGGGTCCGGTTCC |
| | | GGCACCGATTTCACCCTGACTATCTCGAGGCTGGAGCCAGAGGACT |
| | | TCGCCGTGTACTACTGCCAGCAGTACGCGGGGTCCCCGCCGTTCAC |
| | | GTTCGGACAGGGAACCAAGGTCGAGATCAAG |
| 139114-aa | 83 | EVQLVESGGGLVQPGGSLRLSCAVSGFALSNHGMSWVRRAPGKGLE |
| VH | | WVSGIVYSGSTYYAASVKGRFTISRDNSRNTLYLQMNSLRPEDTAIYY |
| | | CSAHGGESDVWGQGTTVTVSS |
| 139114-aa | 98 | EIVLTQSPGTLSLSPGERATLSCRASQSIGSSSLAWYQQKPGQAPRLLM |
| VL | | YGASSRASGIPDRFSGSGSGTDFTLTISRLEPEDFAVYYCQQYAGSPPFT |
| | | FGQGTKVEIK |
| 139114-aa | 113 | MALPVTALLLPLALLLHAARPEVQLVESGGGLVQPGGSLRLSCAVSGF |
| Full CAR | | ALSNHGMSWVRRAPGKGLEWVSGIVYSGSTYYAASVKGRFTISRDNS |
| | | RNTLYLQMNSLRPEDTAIYYCSAHGGESDVWGQGTTVTVSSASGGGG |
| | | SGGRASGGGGSEIVLTQSPGTLSLSPGERATLSCRASQSIGSSSLAWYQ |
| | | QKPGQAPRLLMYGASSRASGIPDRFSGSGSGTDFTLTISRLEPEDFAVY |
| | | YCQQYAGSPPFTFGQGTKVEIKTTTPAPRPPTPAPTIASQPLSLRPEACR |
| | | PAAGGAVHTRGLDFACDIYIWAPLAGTCGVLLLSLVITLYCKRGRKKL |
| | | LYIFKQPFMRPVQTTQEEDGCSCRFPEEEEGGCELRVKFSRSADAPAYK |
| | | QGQNQLYNELNLGRREEYDVLDKRRGRDPEMGGKPRRKNPQEGLYN |
| | | ELQKDKMAEAYSEIGMKGERRRGKGHDGLYQGLSTATKDTYDALHM |
| | | QALPPR |
| 139114-nt | 128 | ATGGCCCTCCCTGTCACCGCCCTGCTGCTTCCGCTGGCTCTTCTGCT |
| Full CAR | | CCACGCCGCTCGGCCCGAAGTGCAATTGGTGGAATCTGGTGGAGGA |
| | | CTTGTGCAACCTGGAGGATCACTGAGACTGTCATGCGCGGTGTCCG |
| | | GTTTTGCCCTGAGCAATCATGGGATGTCGTGGGTCCGGCGCGCCCC |
| | | CGGAAAGGGTCTGGAATGGGTGTCGGGTATCGTCTACTCCGGGAGC |
| | | ACTTACTACGCCGCGAGCGTGAAGGGCCGCTTCACCATTTCCCGCG |
| | | ATAACTCCCGCAACACCCTGTACTTGCAAATGAACTCGCTCCGGCC |
| | | TGAGGACACTGCCATCTACTACTGCTCCGCACACGGAGGAGAATCC |
| | | GACGTGTGGGGCCAGGGAACTACCGTGACCGTCAGCAGCGCCTCCG |
| | | GCGGCGGGGGCTCAGGCGGACGGGCTAGCGGCGGCGGTGGCTCCG |
| | | AGATCGTGCTGACCCAGTCGCCTGGCACTCTCTCGCTGAGCCCCGG |
| | | GGAAAGGGCAACCCTGTCCTGTCGGGCCAGCCAGTCCATTGGATCA |
| | | TCCTCCCTCGCCTGGTATCAGCAGAAACCGGGACAGGCTCCGCGGC |
| | | TGCTTATGTATGGGGCCAGCTCAAGAGCCTCCGGCATTCCCGACCG |
| | | GTTCTCCGGGTCCGGTTCCGGCACCGATTTCACCCTGACTATCTCGA |
| | | GGCTGGAGCCAGAGGACTTCGCCGTGTACTACTGCCAGCAGTACGC |
| | | GGGGTCCCCGCCGTTCACGTTCGGACAGGGAACCAAGGTCGAGATC |
| | | AAGACCACTACCCCAGCACCGAGGCCACCCACCCCGGCTCCTACCA |
| | | TCGCCTCCCAGCCTCTGTCCCTGCGTCCGGAGGCATGTAGACCCGC |
| | | AGCTGGTGGGGCCGTGCATACCCGGGGTCTTGACTTCGCCTGCGAT |
| | | ATCTACATTTGGGCCCCTCTGGCTGGTACTTGCGGGGTCCTGCTGCT |
| | | TTCACTCGTGATCACTCTTTACTGTAAGCGCGGTCGGAAGAAGCTG |
| | | CTGTACATCTTTAAGCAACCCTTCATGAGGCCTGTGCAGACTACTCA |
| | | AGAGGAGGACGGCTGTTCATGCCGGTTCCCAGAGGAGGAGGAAGG |
| | | CGGCTGCGAACTGCGCGTGAAATTCAGCCGCAGCGCAGATGCTCCA |
| | | GCCTACAAGCAGGGGCAGAACCAGCTCTACAACGAACTCAATCTTG |
| | | GTCGGAGAGAGGAGTACGACGTGCTGGACAAGCGGAGAGGACGGG |
| | | ACCCAGAAATGGGCGGGAAGCCGCGCAGAAAGAATCCCCAAGAGG |
| | | GCCTGTACAACGAGCTCCAAAAGGATAAGATGGCAGAAGCCTATA |
| | | GCGAGATTGGTATGAAAGGGGAACGCAGAAGAGGCAAAGGCCACG |
| | | ACGGACTGTACCAGGGACTCAGCACCGCCACCAAGGACACCTATGA |
| | | CGCTCTTCACATGCAGGCCCTGCCGCCTCGG |

149362

| | | |
|---|---|---|
| 149362-aa | 129 | QVQLQESGPGLVKPSETLSLTCTVSGGSISSSYYYWGWIRQPPGKGLE |
| ScFv domain | | WIGSIYYSGSAYYNPSLKSRVTISVDTSKNQFSLRLSSVTAADTAVYYC |
| | | ARHWQEWPDAFDIWGQGTMVTVSSGGGGSGGGGSGGGGSETTLTQS |
| | | PAFMSATPGDKVIISCKASQDIDDAMNWYQQKPGEAPLFIIQSATSPVP |
| | | GIPPRFSGSGFGTDFSLTINNIESEDAAYYFCLQHDNFPLTFGQGTKLEIK |
| 149362-nt | 150 | CAAGTGCAGCTTCAGGAAAGCGGACCGGGCCTGGTCAAGCCATCCG |
| ScFv domain | | AAACTCTCTCCCTGACTTGCACTGTGTCTGGCGGTTCCATCTCATCG |
| | | TCGTACTACTACTGGGGCTGGATTAGGCAGCCGCCCGGAAAGGGAC |
| | | TGGAGTGGATCGGAAGCATCTACTATTCCGGCTCGGCGTACTACAA |
| | | CCCTAGCCTCAAGTCGAGAGTGACCATCTCCGTGGATACCTCCAAG |
| | | AACCAGTTTTCCCTGCGCCTGAGCTCCGTGACCGCCGCTGACACCG |
| | | CCGTGTACTACTGTGCTCGGCATTGGCAGGAATGGCCCGATGCCTT |
| | | CGACATTTGGGGCCAGGGCACTATGGTCACTGTGTCATCCGGGGGT |
| | | GGAGGCAGCGGGGGAGGAGGGTCCGGGGGGGGAGGTTCAGAGAC |
| | | AACCTTGACCCAGTCACCCGCATTCATGTCCGCCACTCCGGGAGAC |
| | | AAGGTCATCATCTCGTGCAAAGCGTCCCAGGATATCGACGATGCCA |
| | | TGAATTGGTACCAGCAGAAGCCTGGCGAAGCGCCGCTGTTCATTAT |
| | | CCAATCCGCAACCTCGCCCGTGCCTGGAATCCCACCGCGGTTCAGC |
| | | GGCAGCGGTTTCGGAACCGACTTTTCCCTGACCATTAACAACATTG |
| | | AGTCCGAGGACGCCGCCTACTACTTCTGCCTGCAACACGACAACTT |
| | | CCCTCTCACGTTCGGCCAGGGAACCAAGCTGGAAATCAAG |
| 149362-aa | 171 | QVQLQESGPGLVKPSETLSLTCTVSGGSISSSYYYWGWIRQPPGKGLE |
| VH | | WIGSIYYSGSAYYNPSLKSRVTISVDTSKNQFSLRLSSVTAADTAVYYC |
| | | ARHWQEWPDAFDIWGQGTMVTVSS |
| 149362-aa | 192 | ETTLTQSPAFMSATPGDKVIISCKASQDIDDAMNWYQQKPGEAPLFIIQ |
| VL | | SATSPVPGIPPRFSGSGFGTDFSLTINNIESEDAAYYFCLQHDNFPLTFGQ |
| | | GTKLEIK |
| 149362-aa | 213 | MALPVTALLLPLALLLHAARPQVQLQESGPGLVKPSETLSLTCTVSGGS |
| Full CAR | | ISSSYYYWGWIRQPPGKGLEWIGSIYYSGSAYYNPSLKSRVTISVDTSK |
| | | NQFSLRLSSVTAADTAVYYCARHWQEWPDAFDIWGQGTMVTVSSGG |
| | | GGSGGGGSGGGGSETTLTQSPAFMSATPGDKVIISCKASQDIDDAMNW |
| | | YQQKPGEAPLFIIQSATSPVPGIPPRFSGSGFGTDFSLTINNIESEDAAYY |
| | | FCLQHDNFPLTFGQGTKLEIKTTTPAPRPPTPAPTIASQPLSLRPEACRPA |
| | | AGGAVHTRGLDFACDIYIWAPLAGTCGVLLLSLVITLYCKRGRKKLLY |
| | | IFKQPFMRPVQTTQEEDGCSCRFPEEEEGGCELRVKFSRSADAPAYKQ |
| | | GQNQLYNELNLGRREEYDVLDKRRGRDPEMGGKPRRKNPQEGLYNE |
| | | LQKDKMAEAYSEIGMKGERRRGKGHDGLYQGLSTATKDTYDALHMQ |
| | | ALPPR |
| 149362-nt | 234 | ATGGCCCTCCCTGTCACCGCCCTGCTGCTTCCGCTGGCTCTTCTGCT |
| Full CAR | | CCACGCCGCTCGGCCCCAAGTGCAGCTTCAGGAAAGCGGACCGGGC |
| | | CTGGTCAAGCCATCCGAAACTCTCTCCCTGACTTGCACTGTGTCTGG |
| | | CGGTTCCATCTCATCGTCGTACTACTACTGGGGCTGGATTAGGCAGC |
| | | CGCCCGGAAAGGGACTGGAGTGGATCGGAAGCATCTACTATTCCGG |
| | | CTCGGCGTACTACAACCCTAGCCTCAAGTCGAGAGTGACCATCTCC |
| | | GTGGATACCTCCAAGAACCAGTTTTCCCTGCGCCTGAGCTCCGTGA |
| | | CCGCCGCTGACACCGCCGTGTACTACTGTGCTCGGCATTGGCAGGA |
| | | ATGGCCCGATGCCTTCGACATTTGGGGCCAGGGCACTATGGTCACT |
| | | GTGTCATCCGGGGGTGGAGGCAGCGGGGGAGGAGGGTCCGGGGGG |
| | | GGAGGTTCAGAGACAACCTTGACCCAGTCACCCGCATTCATGTCCG |
| | | CCACTCCGGGAGACAAGGTCATCATCTCGTGCAAAGCGTCCCAGGA |
| | | TATCGACGATGCCATGAATTGGTACCAGCAGAAGCCTGGCGAAGCG |
| | | CCGCTGTTCATTATCCAATCCGCAACCTCGCCCGTGCCTGGAATCCC |
| | | ACCGCGGTTCAGCGGCAGCGGTTTCGGAACCGACTTTTCCCTGACC |
| | | ATTAACAACATTGAGTCCGAGGACGCCGCCTACTACTTCTGCCTGC |
| | | AACACGACAACTTCCCTCTCACGTTCGGCCAGGGAACCAAGCTGGA |
| | | AATCAAGACCACTACCCCAGCACCGAGGCCACCCACCCCGGCTCCT |
| | | ACCATCGCCTCCCAGCCTCTGTCCCTGCGTCCGGAGGCATGTAGAC |
| | | CCGCAGCTGGTGGGGCCGTGCATACCCGGGGTCTTGACTTCGCCTG |
| | | CGATATCTACATTTGGGCCCCTCTGGCTGGTACTTGCGGGGTCCTGC |
| | | TGCTTTCACTCGTGATCACTCTTTACTGTAAGCGCGGTCGGAAGAAG |
| | | CTGCTGTACATCTTTAAGCAACCCTTCATGAGGCCTGTGCAGACTAC |
| | | TCAAGAGGAGGACGGCTGTTCATGCCGGTTCCCAGAGGAGGAGGA |
| | | AGGCGGCTGCGAACTGCGCGTGAAATTCAGCCGCAGCGCAGATGCT |
| | | CCAGCCTACAAGCAGGGGCAGAACCAGCTCTACAACGAACTCAATC |
| | | TTGGTCGGAGAGAGGAGTACGACGTGCTGGACAAGCGGAGAGGAC |
| | | GGGACCCAGAAATGGGCGGGAAGCCGCGCAGAAAGAATCCCCAAG |
| | | AGGGCCTGTACAACGAGCTCCAAAAGGATAAGATGGCAGAAGCCT |
| | | ATAGCGAGATTGGTATGAAAGGGGAACGCAGAAGAGGCAAAGGCC |
| | | ACGACGGACTGTACCAGGGACTCAGCACCGCCACCAAGGACACCT |
| | | ATGACGCTCTTCACATGCAGGCCCTGCCGCCTCGG |

149363

| | | |
|---|---|---|
| 149363-aa | 130 | VNLRESGPALVKPTQTLTLTCTFSGFSLRTSGMCVSWIRQPPGKALEW |
| ScFv domain | | LARIDWDEDKFYSTSLKTRLTISKDTSDNQVVLRMTNMDPADTATYY |
| | | CARSGAGGTSATAFDIWGPGTMVTVSSGGGGSGGGGSGGGGSDIQMT |
| | | QSPSSLSASVGDRVTITCRASQDIYNNLAWFQLKPGSAPRSLMYAANK |
| | | SQSGVPSRFSGSASGTDFTLTISSLQPEDFATYYCQHYYRFPYSFGQGT |
| | | KLEIK |
| 149363-nt | 151 | CAAGTCAATCTGCGCGAATCCGGCCCCGCCTTGGTCAAGCCTACCC |
| ScFv domain | | AGACCCTCACTCTGACCTGTACTTTCTCCGGCTTCTCCCTGCGGACT |
| | | TCCGGGATGTGCGTGTCCTGGATCAGACAGCCTCCGGGAAAGGCCC |
| | | TGGAGTGGCTCGCTCGCATTGACTGGGATGAGGACAAGTTCTACTC |
| | | CACCTCACTCAAGACCAGGCTGACCATCAGCAAAGATACCTCTGAC |
| | | AACCAAGTGGTGCTCCGCATGACCAACATGGACCCAGCCGACACTG |
| | | CCACTTACTACTGCGCGAGGAGCGGAGCGGGCGGAACCTCCGCCAC |
| | | CGCCTTCGATATTTGGGGCCCGGGTACCATGGTCACCGTGTCAAGC |
| | | GGAGGAGGGGGGTCCGGGGGCGGCGGTTCCGGGGGAGGCGGATCG |
| | | GACATTCAGATGACTCAGTCACCATCGTCCCTGAGCGCTAGCGTGG |
| | | GCGACAGAGTGACAATCACTTGCCGGGCATCCCAGGACATCTATAA |
| | | CAACCTTGCGTGGTTCCAGCTGAAGCCTGGTTCCGCACCGCGGTCA |
| | | CTTATGTACGCCGCCAACAAGAGCCAGTCGGGAGTGCCGTCCCGGT |
| | | TTTCCGGTTCGGCCTCGGGAACTGACTTCACCCTGACGATCTCCAGC |
| | | CTGCAACCCGAGGATTTCGCCACCTACTACTGCCAGCACTACTACC |
| | | GCTTTCCCTACTCGTTCGGACAGGGAACCAAGCTGGAAATCAAG |
| 149363-aa | 172 | QVNLRESGPALVKPTQTLTLTCTFSGFSLRTSGMCVSWIRQPPGKALE |
| VH | | WLARIDWDEDKFYSTSLKTRLTISKDTSDNQVVLRMTNMDPADTATY |
| | | YCARSGAGGTSATAFDIWGPGTMVTVSS |
| 149363-aa | 193 | DIQMTQSPSSLSASVGDRVTITCRASQDIYNNLAWFQLKPGSAPRSLMY |
| VL | | AANKSQSGVPSRFSGSASGTDFTLTISSLQPEDFATYYCQHYYRFPYSF |
| | | GQGTKLEIK |
| 149363-aa | 214 | MALPVTALLLPLALLLHAARPQVNLRESGPALVKPTQTLTLTCTFSGFS |
| Full CAR | | LRTSGMCVSWIRQPPGKALEWLARIDWDEDKFYSTSLKTRLTISKDTS |
| | | DNQVVLRMTNMDPADTATYYCARSGAGGTSATAFDIWGPGTMVTVS |
| | | SGGGGSGGGGSGGGGSDIQMTQSPSSLSASVGDRVTITCRASQDIYNN |
| | | LAWFQLKPGSAPRSLMYAANKSQSGVPSRFSGSASGTDFTLTISSLQPE |
| | | DFATYYCQHYYRFPYSFGQGTKLEIKTTTPAPRPPTPAPTIASQPLSLRP |
| | | EACRPAAGGAVHTRGLDFACDIYIWAPLAGTCGVLLLSLVITLYCKRG |
| | | RKKLLYIFKQPFMRPVQTTQEEDGCSCRFPEEEEGGCELRVKFSRSADA |
| | | PAYKQGQNQLYNELNLGRREEYDVLDKRRGRDPEMGGKPRRKNPQE |
| | | GLYNELQKDKMAEAYSEIGMKGERRRGKGHDGLYQGLSTATKDTYD |
| | | ALHMQALPPR |
| 149363-nt | 235 | ATGGCCCTCCCTGTCACCGCCCTGCTGCTTCCGCTGGCTCTTCTGCT |
| Full CAR | | CCACGCCGCTCGGCCCCAAGTCAATCTGCGCGAATCCGGCCCCGCC |
| | | TTGGTCAAGCCTACCCAGACCCTCACTCTGACCTGTACTTTCTCCGG |
| | | CTTCTCCCTGCGGACTTCCGGGATGTGCGTGTCCTGGATCAGACAGC |
| | | CTCCGGGAAAGGCCCTGGAGTGGCTCGCTCGCATTGACTGGGATGA |
| | | GGACAAGTTCTACTCCACCTCACTCAAGACCAGGCTGACCATCAGC |
| | | AAAGATACCTCTGACAACCAAGTGGTGCTCCGCATGACCAACATGG |
| | | ACCCAGCCGACACTGCCACTTACTACTGCGCGAGGAGCGGAGCGGG |
| | | CGGAACCTCCGCCACCGCCTTCGATATTTGGGGCCCGGGTACCATG |
| | | GTCACCGTGTCAAGCGGAGGAGGGGGGTCCGGGGGCGGCGGTTCC |
| | | GGGGGAGGCGGATCGGACATTCAGATGACTCAGTCACCATCGTCCC |
| | | TGAGCGCTAGCGTGGGCGACAGAGTGACAATCACTTGCCGGGCATC |
| | | CCAGGACATCTATAACAACCTTGCGTGGTTCCAGCTGAAGCCTGGT |
| | | TCCGCACCGCGGTCACTTATGTACGCCGCCAACAAGAGCCAGTCGG |
| | | GAGTGCCGTCCCGGTTTTCCGGTTCGGCCTCGGGAACTGACTTCACC |
| | | CTGACGATCTCCAGCCTGCAACCCGAGGATTTCGCCACCTACTACT |
| | | GCCAGCACTACTACCGCTTTCCCTACTCGTTCGGACAGGGAACCAA |
| | | GCTGGAAATCAAGACCACTACCCCAGCACCGAGGCCACCCACCCCG |
| | | GCTCCTACCATCGCCTCCCAGCCTCTGTCCCTGCGTCCGGAGGCATG |
| | | TAGACCCGCAGCTGGTGGGGCCGTGCATACCCGGGGTCTTGACTTC |
| | | GCCTGCGATATCTACATTTGGGCCCCTCTGGCTGGTACTTGCGGGGT |
| | | CCTGCTGCTTTCACTCGTGATCACTCTTTACTGTAAGCGCGGTCGGA |
| | | AGAAGCTGCTGTACATCTTTAAGCAACCCTTCATGAGGCCTGTGCA |
| | | GACTACTCAAGAGGAGGACGGCTGTTCATGCCGGTTCCCAGAGGAG |
| | | GAGGAAGGCGGCTGCGAACTGCGCGTGAAATTCAGCCGCAGCGCA |
| | | GATGCTCCAGCCTACAAGCAGGGGCAGAACCAGCTCTACAACGAA |
| | | CTCAATCTTGGTCGGAGAGAGGAGTACGACGTGCTGGACAAGCGG |
| | | AGAGGACGGGACCCAGAAATGGGCGGGAAGCCGCGCAGAAAGAAT |
| | | CCCCAAGAGGGCCTGTACAACGAGCTCCAAAAGGATAAGATGGCA |
| | | GAAGCCTATAGCGAGATTGGTATGAAAGGGGAACGCAGAAGAGGC |
| | | AAAGGCCACGACGGACTGTACCAGGGACTCAGCACCGCCACCAAG |
| | | GACACCTATGACGCTCTTCACATGCAGGCCCTGCCGCCTCGG |

149364

| | | |
|---|---|---|
| 149364-aa | 131 | EVQLVESGGGLVKPGGSLRLSCAASGFTFSSYSMNWVRQAPGKGLEW |
| ScFv domain | | VSSISSSSSYIYYADSVKGRFTISRDNAKNSLYLQMNSLRAEDTAVYYC |
| | | AKTIAAVYAFDIWGQGTTVTVSSGGGGSGGGGSGGGGSEIVLTQSPLS |
| | | LPVTPEEPASISCRSSQSLLHSNGYNYLDWYLQKPGQSPQLLIYLGSNR |
| | | ASGVPDRFSGSGSGTDFTLKISRVEAEDVGVYYCMQALQTPYTFGQGT |
| | | KLEIK |
| 149364-nt | 152 | GAAGTGCAGCTTGTCGAATCCGGGGGGGGACTGGTCAAGCCGGGC |
| ScFv domain | | GGATCACTGAGACTGTCCTGCGCCGCGAGCGGCTTCACGTTCTCCTC |
| | | CTACTCCATGAACTGGGTCCGCCAAGCCCCCGGGAAGGGACTGGAA |
| | | TGGGTGTCCTCTATCTCCTCGTCGTCGTCCTACATCTACTACGCCGA |
| | | CTCCGTGAAGGGAAGATTCACCATTTCCCGCGACAACGCAAAGAAC |
| | | TCACTGTACTTGCAAATGAACTCACTCCGGGCCGAAGATACTGCTG |
| | | TGTACTATTGCGCCAAGACTATTGCCGCCGTCTACGCTTTCGACATC |
| | | TGGGGCCAGGGAACCACCGTGACTGTGTCGTCCGGTGGTGGTGGCT |
| | | CGGGCGGAGGAGGAAGCGGCGGCGGGGGGTCCGAGATTGTGCTGA |
| | | CCCAGTCGCCACTGAGCCTCCCTGTGACCCCCGAGGAACCCGCCAG |
| | | CATCAGCTGCCGGTCCAGCCAGTCCCTGCTCCACTCCAACGGATAC |
| | | AATTACCTCGATTGGTACCTTCAGAAGCCTGGACAAAGCCCGCAGC |
| | | TGCTCATCTACTTGGGATCAAACCGCGCGTCAGGAGTGCCTGACCG |
| | | GTTCTCCGGCTCGGGCAGCGGTACCGATTTCACCCTGAAAATCTCC |
| | | AGGGTGGAGGCAGAGGACGTGGGAGTGTATTACTGTATGCAGGCG |
| | | CTGCAGACTCCGTACACATTTGGGCAGGGCACCAAGCTGGAGATCA |
| | | AG |
| 149364-aa | 173 | EVQLVESGGGLVKPGGSLRLSCAASGFTFSSYSMNWVRQAPGKGLEW |
| VH | | VSSISSSSSYIYYADSVKGRFTISRDNAKNSLYLQMNSLRAEDTAVYYC |
| | | AKTIAAVYAFDIWGQGTTVTVSS |
| 149364-aa | 194 | EIVLTQSPLSLPVTPEEPASISCRSSQSLLHSNGYNYLDWYLQKPGQSPQ |
| VL | | LLIYLGSNRASGVPDRFSGSGSGTDFTLKISRVEAEDVGVYYCMQALQ |
| | | TPYTFGQGTKLEIK |
| 149364-aa | 215 | MALPVTALLLPLALLLHAARPEVQLVESGGGLVKPGGSLRLSCAASGF |
| Full CAR | | TFSSYSMNWVRQAPGKGLEWVSSISSSSSYIYYADSVKGRFTISRDNAK |
| | | NSLYLQMNSLRAEDTAVYYCAKTIAAVYAFDIWGQGTTVTVSSGGGG |
| | | SGGGGSGGGGSEIVLTQSPLSLPVTPEEPASISCRSSQSLLHSNGYNYLD |
| | | WYLQKPGQSPQLLIYLGSNRASGVPDRFSGSGSGTDFTLKISRVEAEDV |
| | | GVYYCMQALQTPYTFGQGTKLEIKTTTPAPRPPTPAPTIASQPLSLRPEA |
| | | CRPAAGGAVHTRGLDFACDIYIWAPLAGTCGVLLLSLVITLYCKRGRK |
| | | KLLYIFKQPFMRPVQTTQEEDGCSCRFPEEEEGGCELRVKFSRSADAPA |
| | | YKQGQNQLYNELNLGRREEYDVLDKRRGRDPEMGGKPRRKNPQEGL |
| | | YNELQKDKMAEAYSEIGMKGERRRGKGHDGLYQGLSTATKDTYDAL |
| | | HMQALPPR |
| 149364-nt | 236 | ATGGCCCTCCCTGTCACCGCCCTGCTGCTTCCGCTGGCTCTTCTGCT |
| Full CAR | | CCACGCCGCTCGGCCCGAAGTGCAGCTTGTCGAATCCGGGGGGGGA |
| | | CTGGTCAAGCCGGGCGGATCACTGAGACTGTCCTGCGCCGCGAGCG |
| | | GCTTCACGTTCTCCTCCTACTCCATGAACTGGGTCCGCCAAGCCCCC |
| | | GGGAAGGGACTGGAATGGGTGTCCTCTATCTCCTCGTCGTCGTCCT |
| | | ACATCTACTACGCCGACTCCGTGAAGGGAAGATTCACCATTTCCCG |
| | | CGACAACGCAAAGAACTCACTGTACTTGCAAATGAACTCACTCCGG |
| | | GCCGAAGATACTGCTGTGTACTATTGCGCCAAGACTATTGCCGCCG |
| | | TCTACGCTTTCGACATCTGGGGCCAGGGAACCACCGTGACTGTGTC |
| | | GTCCGGTGGTGGTGGCTCGGGCGGAGGAGGAAGCGGCGGCGGGGG |
| | | GTCCGAGATTGTGCTGACCCAGTCGCCACTGAGCCTCCCTGTGACC |
| | | CCCGAGGAACCCGCCAGCATCAGCTGCCGGTCCAGCCAGTCCCTGC |
| | | TCCACTCCAACGGATACAATTACCTCGATTGGTACCTTCAGAAGCCT |
| | | GGACAAAGCCCGCAGCTGCTCATCTACTTGGGATCAAACCGCGCGT |
| | | CAGGAGTGCCTGACCGGTTCTCCGGCTCGGGCAGCGGTACCGATTT |
| | | CACCCTGAAAATCTCCAGGGTGGAGGCAGAGGACGTGGGAGTGTA |
| | | TTACTGTATGCAGGCGCTGCAGACTCCGTACACATTTGGGCAGGGC |
| | | ACCAAGCTGGAGATCAAGACCACTACCCCAGCACCGAGGCCACCC |
| | | ACCCCGGCTCCTACCATCGCCTCCCAGCCTCTGTCCCTGCGTCCGGA |
| | | GGCATGTAGACCCGCAGCTGGTGGGGCCGTGCATACCCGGGGTCTT |
| | | GACTTCGCCTGCGATATCTACATTTGGGCCCCTCTGGCTGGTACTTG |
| | | CGGGGTCCTGCTGCTTTCACTCGTGATCACTCTTTACTGTAAGCGCG |
| | | GTCGGAAGAAGCTGCTGTACATCTTTAAGCAACCCTTCATGAGGCC |
| | | TGTGCAGACTACTCAAGAGGAGGACGGCTGTTCATGCCGGTTCCCA |
| | | GAGGAGGAGGAAGGCGGCTGCGAACTGCGCGTGAAATTCAGCCGC |
| | | AGCGCAGATGCTCCAGCCTACAAGCAGGGGCAGAACCAGCTCTAC |
| | | AACGAACTCAATCTTGGTCGGAGAGAGGAGTACGACGTGCTGGAC |
| | | AAGCGGAGAGGACGGGACCCAGAAATGGGCGGGAAGCCGCGCAG |
| | | AAAGAATCCCCAAGAGGGCCTGTACAACGAGCTCCAAAAGGATAA |
| | | GATGGCAGAAGCCTATAGCGAGATTGGTATGAAAGGGGAACGCAG |
| | | AAGAGGCAAAGGCCACGACGGACTGTACCAGGGACTCAGCACCGC |
| | | CACCAAGGACACCTATGACGCTCTTCACATGCAGGCCCTGCCGCCT |
| | | CGG |

149365

| | | |
|---|---|---|
| 149365-aa | 132 | EVQLVESGGGLVKPGGSLRLSCAASGFTFSDYYMSWIRQAPGKGLEW |
| ScFv domain | | VSYISSSGSTIYYADSVKGRFTISRDNAKNSLYLQMNSLRAEDTAVYYC |
| | | ARDLRGAFDIWGQGTMVTVSSGGGGSGGGGSGGGGSSYVLTQSPSVS |
| | | AAPGYTATISCGGNNIGTKSVHWYQQKPGQAPLLVIRDDSVRPSKIPGR |
| | | FSGSNSGNMATLTISGVQAGDEADFYCQVWDSDSEHVVFGGGTKLTV |
| | | L |
| 149365-nt | 153 | GAAGTCCAGCTCGTGGAGTCCGGCGGAGGCCTTGTGAAGCCTGGAG |
| ScFv domain | | GTTCGCTGAGACTGTCCTGCGCCGCCTCCGGCTTCACCTTCTCCGAC |
| | | TACTACATGTCCTGGATCAGACAGGCCCCGGGAAAGGGCCTGGAAT |
| | | GGGTGTCCTACATCTCGTCATCGGGCAGCACTATCTACTACGCGGA |
| | | CTCAGTGAAGGGGCGGTTCACCATTTCCCGGGATAACGCGAAGAAC |
| | | TCGCTGTATCTGCAAATGAACTCACTGAGGGCCGAGGACACCGCCG |
| | | TGTACTACTGCGCCCGCGATCTCCGCGGGGCATTTGACATCTGGGG |
| | | ACAGGGAACCATGGTCACAGTGTCCAGCGGAGGGGGAGGATCGGG |
| | | TGGCGGAGGTTCCGGGGGTGGAGGCTCCTCCTACGTGCTGACTCAG |
| | | AGCCCAAGCGTCAGCGCTGCGCCCGGTTACACGGCAACCATCTCCT |
| | | GTGGCGGAAACAACATTGGGACCAAGTCTGTGCACTGGTATCAGCA |
| | | GAAGCCGGGCCAAGCTCCCCTGTTGGTGATCCGCGATGACTCCGTG |
| | | CGGCCTAGCAAAATTCCGGGACGGTTCTCCGGCTCCAACAGCGGCA |
| | | ATATGGCCACTCTCACCATCTCGGGAGTGCAGGCCGGAGATGAAGC |
| | | CGACTTCTACTGCCAAGTCTGGGACTCAGACTCCGAGCATGTGGTG |
| | | TTCGGGGGCGGAACCAAGCTGACTGTGCTC |
| 149365-aa | 174 | EVQLVESGGGLVKPGGSLRLSCAASGFTFSDYYMSWIRQAPGKGLEW |
| VH | | VSYISSSGSTIYYADSVKGRFTISRDNAKNSLYLQMNSLRAEDTAVYYC |
| | | ARDLRGAFDIWGQGTMVTVSS |
| 149365-aa | 195 | SYVLTQSPSVSAAPGYTATISCGGNNIGTKSVHWYQQKPGQAPLLVIR |
| VL | | DDSVRPSKIPGRFSGSNSGNMATLTISGVQAGDEADFYCQVWDSDSEH |
| | | VVFGGGTKLTVL |
| 149365-aa | 216 | MALPVTALLLPLALLLHAARPEVQLVESGGGLVKPGGSLRLSCAASGF |
| Full CAR | | TFSDYYMSWIRQAPGKGLEWVSYISSSGSTIYYADSVKGRFTISRDNAK |
| | | NSLYLQMNSLRAEDTAVYYCARDLRGAFDIWGQGTMVTVSSGGGGS |
| | | GGGGSGGGGSSYVLTQSPSVSAAPGYTATISCGGNNIGTKSVHWYQQ |
| | | KPGQAPLLVIRDDSVRPSKIPGRFSGSNSGNMATLTISGVQAGDEADFY |
| | | CQVWDSDSEHVVFGGGTKLTVLTTTPAPRPPTPAPTIASQPLSLRPEAC |
| | | RPAAGGAVHTRGLDFACDIYIWAPLAGTCGVLLLSLVITLYCKRGRKK |
| | | LLYIFKQPFMRPVQTTQEEDGCSCRFPEEEEGGCELRVKFSRSADAPAY |
| | | KQGQNQLYNELNLGRREEYDVLDKRRGRDPEMGGKPRRKNPQEGLY |
| | | NELQKDKMAEAYSEIGMKGERRRGKGHDGLYQGLSTATKDTYDALH |
| | | MQALPPR |
| 149365-nt | 237 | ATGGCCCTCCCTGTCACCGCCCTGCTGCTTCCGCTGGCTCTTCTGCT |
| Full CAR | | CCACGCCGCTCGGCCCGAAGTCCAGCTCGTGGAGTCCGGCGGAGGC |
| | | CTTGTGAAGCCTGGAGGTTCGCTGAGACTGTCCTGCGCCGCCTCCG |
| | | GCTTCACCTTCTCCGACTACTACATGTCCTGGATCAGACAGGCCCCG |
| | | GGAAAGGGCCTGGAATGGGTGTCCTACATCTCGTCATCGGGCAGCA |
| | | CTATCTACTACGCGGACTCAGTGAAGGGGCGGTTCACCATTTCCCG |
| | | GGATAACGCGAAGAACTCGCTGTATCTGCAAATGAACTCACTGAGG |
| | | GCCGAGGACACCGCCGTGTACTACTGCGCCCGCGATCTCCGCGGGG |
| | | CATTTGACATCTGGGGACAGGGAACCATGGTCACAGTGTCCAGCGG |
| | | AGGGGGAGGATCGGGTGGCGGAGGTTCCGGGGGTGGAGGCTCCTC |
| | | CTACGTGCTGACTCAGAGCCCAAGCGTCAGCGCTGCGCCCGGTTAC |
| | | ACGGCAACCATCTCCTGTGGCGGAAACAACATTGGGACCAAGTCTG |
| | | TGCACTGGTATCAGCAGAAGCCGGGCCAAGCTCCCCTGTTGGTGAT |
| | | CCGCGATGACTCCGTGCGGCCTAGCAAAATTCCGGGACGGTTCTCC |
| | | GGCTCCAACAGCGGCAATATGGCCACTCTCACCATCTCGGGAGTGC |
| | | AGGCCGGAGATGAAGCCGACTTCTACTGCCAAGTCTGGGACTCAGA |
| | | CTCCGAGCATGTGGTGTTCGGGGGCGGAACCAAGCTGACTGTGCTC |
| | | ACCACTACCCCAGCACCGAGGCCACCCACCCCGGCTCCTACCATCG |
| | | CCTCCCAGCCTCTGTCCCTGCGTCCGGAGGCATGTAGACCCGCAGC |
| | | TGGTGGGGCCGTGCATACCCGGGGTCTTGACTTCGCCTGCGATATCT |
| | | ACATTTGGGCCCCTCTGGCTGGTACTTGCGGGGTCCTGCTGCTTTCA |
| | | CTCGTGATCACTCTTTACTGTAAGCGCGGTCGGAAGAAGCTGCTGT |
| | | ACATCTTTAAGCAACCCTTCATGAGGCCTGTGCAGACTACTCAAGA |
| | | GGAGGACGGCTGTTCATGCCGGTTCCCAGAGGAGGAGGAAGGCGG |
| | | CTGCGAACTGCGCGTGAAATTCAGCCGCAGCGCAGATGCTCCAGCC |
| | | TACAAGCAGGGGCAGAACCAGCTCTACAACGAACTCAATCTTGGTC |
| | | GGAGAGAGGAGTACGACGTGCTGGACAAGCGGAGAGGACGGGACC |
| | | CAGAAATGGGCGGGAAGCCGCGCAGAAAGAATCCCCAAGAGGGCC |
| | | TGTACAACGAGCTCCAAAAGGATAAGATGGCAGAAGCCTATAGCG |
| | | AGATTGGTATGAAAGGGGAACGCAGAAGAGGCAAAGGCCACGACG |
| | | GACTGTACCAGGGACTCAGCACCGCCACCAAGGACACCTATGACGC |
| | | TCTTCACATGCAGGCCCTGCCGCCTCGG |

149366

| | | |
|---|---|---|
| 149366-aa | 133 | QVQLVQSGAEVKKPGASVKVSCKPSGYTVTSHYIHWVRRAPGQGLE |
| ScFv domain | | WMGMINPSGGVTAYSQTLQGRVTMTSDTSSSTVYMELSSLRSEDTAM |
| | | YYCAREGSGSGWYFDFWGRGTLVTVSSGGGGSGGGGSGGGGSSYVL |
| | | TQPPSVSVSPGQTASITCSGDGLSKKYVSWYQQKAGQSPVVLISRDKE |
| | | RPSGIPDRFSGSNSADTATLTISGTQAMDEADYYCQAWDDTTVVFGGG |
| | | TKLTVL |
| 149366-nt | 154 | CAAGTGCAGCTGGTGCAGAGCGGGGCCGAAGTCAAGAAGCCGGGA |
| ScFv domain | | GCCTCCGTGAAAGTGTCCTGCAAGCCTTCGGGATACACCGTGACCT |
| | | CCCACTACATTCATTGGGTCCGCCGCGCCCCCGGCCAAGGACTCGA |
| | | GTGGATGGGCATGATCAACCCTAGCGGCGGAGTGACCGCGTACAGC |
| | | CAGACGCTGCAGGGACGCGTGACTATGACCTCGGATACCTCCTCCT |
| | | CCACCGTCTATATGGAACTGTCCAGCCTGCGGTCCGAGGATACCGC |
| | | CATGTACTACTGCGCCCGGGAAGGATCAGGCTCCGGGTGGTATTTC |
| | | GACTTCTGGGGAAGAGGCACCCTCGTGACTGTGTCATCTGGGGGAG |
| | | GGGGTTCCGGTGGTGGCGGATCGGGAGGAGGCGGTTCATCCTACGT |
| | | GCTGACCCAGCCACCCTCCGTGTCCGTGAGCCCCGGCCAGACTGCA |
| | | TCGATTACATGTAGCGGCGACGGCCTCTCCAAGAAATACGTGTCGT |
| | | GGTACCAGCAGAAGGCCGGACAGAGCCCGGTGGTGCTGATCTCAA |
| | | GAGATAAGGAGCGGCCTAGCGGAATCCCGGACAGGTTCTCGGGTTC |
| | | CAACTCCGCGGACACTGCTACTCTGACCATCTCGGGGACCCAGGCT |
| | | ATGGACGAAGCCGATTACTACTGCCAAGCCTGGGACGACACTACTG |
| | | TCGTGTTTGGAGGGGGCACCAAGTTGACCGTCCTT |
| 149366-aa | 175 | QVQLVQSGAEVKKPGASVKVSCKPSGYTVTSHYIHWVRRAPGQGLE |
| VH | | WMGMINPSGGVTAYSQTLQGRVTMTSDTSSSTVYMELSSLRSEDTAM |
| | | YYCAREGSGSGWYFDFWGRGTLVTVSS |
| 149366-aa | 196 | SYVLTQPPSVSVSPGQTASITCSGDGLSKKYVSWYQQKAGQSPVVLISR |
| VL | | DKERPSGIPDRFSGSNSADTATLTISGTQAMDEADYYCQAWDDTTVVF |
| | | GGGTKLTVL |
| 149366-aa | 217 | MALPVTALLLPLALLLHAARPQVQLVQSGAEVKKPGASVKVSCKPSG |
| Full CAR | | YTVTSHYIHWVRRAPGQGLEWMGMINPSGGVTAYSQTLQGRVTMTS |
| | | DTSSSTVYMELSSLRSEDTAMYYCAREGSGSGWYFDFWGRGTLVTVS |
| | | SGGGGSGGGGSGGGGSSYVLTQPPSVSVSPGQTASITCSGDGLSKKYV |
| | | SWYQQKAGQSPVVLISRDKERPSGIPDRFSGSNSADTATLTISGTQAMD |
| | | EADYYCQAWDDTTVVFGGGTKLTVLTTTPAPRPPTPAPTIASQPLSLRP |
| | | EACRPAAGGAVHTRGLDFACDIYIWAPLAGTCGVLLLSLVITLYCKRG |
| | | RKKLLYIFKQPFMRPVQTTQEEDGCSCRFPEEEEGGCELRVKFSRSADA |
| | | PAYKQGQNQLYNELNLGRREEYDVLDKRRGRDPEMGGKPRRKNPQE |
| | | GLYNELQKDKMAEAYSEIGMKGERRRGKGHDGLYQGLSTATKDTYD |
| | | ALHMQALPPR |
| 149366-nt | 238 | ATGGCCCTCCCTGTCACCGCCCTGCTGCTTCCGCTGGCTCTTCTGCT |
| Full CAR | | CCACGCCGCTCGGCCCCAAGTGCAGCTGGTGCAGAGCGGGGCCGA |
| | | AGTCAAGAAGCCGGGAGCCTCCGTGAAAGTGTCCTGCAAGCCTTCG |
| | | GGATACACCGTGACCTCCCACTACATTCATTGGGTCCGCCGCGCCC |
| | | CCGGCCAAGGACTCGAGTGGATGGGCATGATCAACCCTAGCGGCG |
| | | GAGTGACCGCGTACAGCCAGACGCTGCAGGGACGCGTGACTATGA |
| | | CCTCGGATACCTCCTCCTCCACCGTCTATATGGAACTGTCCAGCCTG |
| | | CGGTCCGAGGATACCGCCATGTACTACTGCGCCCGGGAAGGATCAG |
| | | GCTCCGGGTGGTATTTCGACTTCTGGGGAAGAGGCACCCTCGTGAC |
| | | TGTGTCATCTGGGGGAGGGGGTTCCGGTGGTGGCGGATCGGGAGGA |
| | | GGCGGTTCATCCTACGTGCTGACCCAGCCACCCTCCGTGTCCGTGA |
| | | GCCCCGGCCAGACTGCATCGATTACATGTAGCGGCGACGGCCTCTC |
| | | CAAGAAATACGTGTCGTGGTACCAGCAGAAGGCCGGACAGAGCCC |
| | | GGTGGTGCTGATCTCAAGAGATAAGGAGCGGCCTAGCGGAATCCCG |
| | | GACAGGTTCTCGGGTTCCAACTCCGCGGACACTGCTACTCTGACCA |
| | | TCTCGGGGACCCAGGCTATGGACGAAGCCGATTACTACTGCCAAGC |
| | | CTGGGACGACACTACTGTCGTGTTTGGAGGGGGCACCAAGTTGACC |
| | | GTCCTTACCACTACCCCAGCACCGAGGCCACCCACCCCGGCTCCTA |
| | | CCATCGCCTCCCAGCCTCTGTCCCTGCGTCCGGAGGCATGTAGACCC |
| | | GCAGCTGGTGGGGCCGTGCATACCCGGGGTCTTGACTTCGCCTGCG |
| | | ATATCTACATTTGGGCCCCTCTGGCTGGTACTTGCGGGGTCCTGCTG |
| | | CTTTCACTCGTGATCACTCTTTACTGTAAGCGCGGTCGGAAGAAGCT |
| | | GCTGTACATCTTTAAGCAACCCTTCATGAGGCCTGTGCAGACTACTC |
| | | AAGAGGAGGACGGCTGTTCATGCCGGTTCCCAGAGGAGGAGGAAG |
| | | GCGGCTGCGAACTGCGCGTGAAATTCAGCCGCAGCGCAGATGCTCC |
| | | AGCCTACAAGCAGGGGCAGAACCAGCTCTACAACGAACTCAATCTT |
| | | GGTCGGAGAGAGGAGTACGACGTGCTGGACAAGCGGAGAGGACGG |
| | | GACCCAGAAATGGGCGGGAAGCCGCGCAGAAAGAATCCCCAAGAG |
| | | GGCCTGTACAACGAGCTCCAAAAGGATAAGATGGCAGAAGCCTAT |
| | | AGCGAGATTGGTATGAAAGGGGAACGCAGAAGAGGCAAAGGCCAC |
| | | GACGGACTGTACCAGGGACTCAGCACCGCCACCAAGGACACCTATG |
| | | ACGCTCTTCACATGCAGGCCCTGCCGCCTCGG |

149367

| | | |
|---|---|---|
| 149367-aa | 134 | QVQLQESGPGLVKPSQTLSLTCTVSGGSISSGGYYWSWIRQHPGKGLE |
| ScFv domain | | WIGYIYYSGSTYYNPSLKSRVTISVDTSKNQFSLKLSSVTAADTAVYYC |
| | | ARAGIAARLRGAFDIWGQGTMVTVSSGGGGSGGGGSGGGGSDIVMTQ |
| | | SPSSVSASVGDRVIITCRASQGIRNWLAWYQQKPGKAPNLLIYAASNL |
| | | QSGVPSRFSGSGSGADFTLTISSLQPEDVATYYCQKYNSAPFTFGPGTK |
| | | VDIK |
| 149367-nt | 155 | CAAGTGCAGCTTCAGGAGAGCGGCCCGGGACTCGTGAAGCCGTCCC |
| ScFv domain | | AGACCCTGTCCCTGACTTGCACCGTGTCGGGAGGAAGCATCTCGAG |
| | | CGGAGGCTACTATTGGTCGTGGATTCGGCAGCACCCTGGAAAGGGC |
| | | CTGGAATGGATCGGCTACATCTACTACTCCGGCTCGACCTACTACA |
| | | ACCCATCGCTGAAGTCCAGAGTGACAATCTCAGTGGACACGTCCAA |
| | | GAATCAGTTCAGCCTGAAGCTCTCTTCCGTGACTGCGGCCGACACC |
| | | GCCGTGTACTACTGCGCACGCGCTGGAATTGCCGCCCGGCTGAGGG |
| | | GTGCCTTCGACATTTGGGGACAGGGCACCATGGTCACCGTGTCCTC |
| | | CGGCGGCGGAGGTTCCGGGGGTGGAGGCTCAGGAGGAGGGGGGTC |
| | | CGACATCGTCATGACTCAGTCGCCCTCAAGCGTCAGCGCGTCCGTC |
| | | GGGGACAGAGTGATCATCACCTGTCGGGCGTCCCAGGGAATTCGCA |
| | | ACTGGCTGGCCTGGTATCAGCAGAAGCCCGGAAAGGCCCCCAACCT |
| | | GTTGATCTACGCCGCCTCAAACCTCCAATCCGGGGTGCCGAGCCGC |
| | | TTCAGCGGCTCCGGTTCGGGTGCCGATTTCACTCTGACCATCTCCTC |
| | | CCTGCAACCTGAAGATGTGGCTACCTACTACTGCCAAAAGTACAAC |
| | | TCCGCACCTTTTACTTTCGGACCGGGGACCAAAGTGGACATTAAG |
| 149367-aa | 176 | QVQLQESGPGLVKPSQTLSLTCTVSGGSISSGGYYWSWIRQHPGKGLE |
| VH | | WIGYIYYSGSTYYNPSLKSRVTISVDTSKNQFSLKLSSVTAADTAVYYC |
| | | ARAGIAARLRGAFDIWGQGTMVTVSS |
| 149367-aa | 197 | DIVMTQSPSSVSASVGDRVIITCRASQGIRNWLAWYQQKPGKAPNLLIY |
| VL | | AASNLQSGVPSRFSGSGSGADFTLTISSLQPEDVATYYCQKYNSAPFTF |
| | | GPGTKVDIK |
| 149367-aa | 218 | MALPVTALLLPLALLLHAARPQVQLQESGPGLVKPSQTLSLTCTVSGG |
| Full CAR | | SISSGGYYWSWIRQHPGKGLEWIGYIYYSGSTYYNPSLKSRVTISVDTS |
| | | KNQFSLKLSSVTAADTAVYYCARAGIAARLRGAFDIWGQGTMVTVSS |
| | | GGGGSGGGGSGGGGSDIVMTQSPSSVSASVGDRVIITCRASQGIRNWL |
| | | AWYQQKPGKAPNLLIYAASNLQSGVPSRFSGSGSGADFTLTISSLQPED |
| | | VATYYCQKYNSAPFTFGPGTKVDIKTTTPAPRPPTPAPTIASQPLSLRPE |
| | | ACRPAAGGAVHTRGLDFACDIYIWAPLAGTCGVLLLSLVITLYCKRGR |
| | | KKLLYIFKQPFMRPVQTTQEEDGCSCRFPEEEEGGCELRVKFSRSADAP |
| | | AYKQGQNQLYNELNLGRREEYDVLDKRRGRDPEMGGKPRRKNPQEG |
| | | LYNELQKDKMAEAYSEIGMKGERRRGKGHDGLYQGLSTATKDTYDA |
| | | LHMQALPPR |
| 149367-nt | 239 | ATGGCCCTCCCTGTCACCGCCCTGCTGCTTCCGCTGGCTCTTCTGCT |
| Full CAR | | CCACGCCGCTCGGCCCCAAGTGCAGCTTCAGGAGAGCGGCCCGGGA |
| | | CTCGTGAAGCCGTCCCAGACCCTGTCCCTGACTTGCACCGTGTCGG |
| | | GAGGAAGCATCTCGAGCGGAGGCTACTATTGGTCGTGGATTCGGCA |
| | | GCACCCTGGAAAGGGCCTGGAATGGATCGGCTACATCTACTACTCC |
| | | GGCTCGACCTACTACAACCCATCGCTGAAGTCCAGAGTGACAATCT |
| | | CAGTGGACACGTCCAAGAATCAGTTCAGCCTGAAGCTCTCTTCCGT |
| | | GACTGCGGCCGACACCGCCGTGTACTACTGCGCACGCGCTGGAATT |
| | | GCCGCCCGGCTGAGGGGTGCCTTCGACATTTGGGGACAGGGCACCA |
| | | TGGTCACCGTGTCCTCCGGCGGCGGAGGTTCCGGGGGTGGAGGCTC |
| | | AGGAGGAGGGGGGTCCGACATCGTCATGACTCAGTCGCCCTCAAGC |
| | | GTCAGCGCGTCCGTCGGGGACAGAGTGATCATCACCTGTCGGGCGT |
| | | CCCAGGGAATTCGCAACTGGCTGGCCTGGTATCAGCAGAAGCCCGG |
| | | AAAGGCCCCCAACCTGTTGATCTACGCCGCCTCAAACCTCCAATCC |
| | | GGGGTGCCGAGCCGCTTCAGCGGCTCCGGTTCGGGTGCCGATTTCA |
| | | CTCTGACCATCTCCTCCCTGCAACCTGAAGATGTGGCTACCTACTAC |
| | | TGCCAAAAGTACAACTCCGCACCTTTTACTTTCGGACCGGGGACCA |
| | | AAGTGGACATTAAGACCACTACCCCAGCACCGAGGCCACCCACCCC |
| | | GGCTCCTACCATCGCCTCCCAGCCTCTGTCCCTGCGTCCGGAGGCAT |
| | | GTAGACCCGCAGCTGGTGGGGCCGTGCATACCCGGGGTCTTGACTT |
| | | CGCCTGCGATATCTACATTTGGGCCCCTCTGGCTGGTACTTGCGGGG |
| | | TCCTGCTGCTTTCACTCGTGATCACTCTTTACTGTAAGCGCGGTCGG |
| | | AAGAAGCTGCTGTACATCTTTAAGCAACCCTTCATGAGGCCTGTGC |
| | | AGACTACTCAAGAGGAGGACGGCTGTTCATGCCGGTTCCCAGAGGA |
| | | GGAGGAAGGCGGCTGCGAACTGCGCGTGAAATTCAGCCGCAGCGC |
| | | AGATGCTCCAGCCTACAAGCAGGGGCAGAACCAGCTCTACAACGA |
| | | ACTCAATCTTGGTCGGAGAGAGGAGTACGACGTGCTGGACAAGCG |
| | | GAGAGGACGGGACCCAGAAATGGGCGGGAAGCCGCGCAGAAAGA |
| | | ATCCCCAAGAGGGCCTGTACAACGAGCTCCAAAAGGATAAGATGG |
| | | CAGAAGCCTATAGCGAGATTGGTATGAAAGGGGAACGCAGAAGAG |
| | | GCAAAGGCCACGACGGACTGTACCAGGGACTCAGCACCGCCACCA |
| | | AGGACACCTATGACGCTCTTCACATGCAGGCCCTGCCGCCTCGG |

149368

| | | |
|---|---|---|
| 149368-aa | 135 | QVQLVQSGAEVKKPGSSVKVSCKASGGTFSSYAISWVRQAPGQGLEW |
| ScFv domain | | MGGIIPIFGTANYAQKFQGRVTITADESTSTAYMELSSLRSEDTAVYYC |
| | | ARRGGYQLLRWDVGLLRSAFDIWGQGTMVTVSSGGGGSGGGGSGGG |
| | | GSSYVLTQPPSVSVAPGQTARITCGGNNIGSKSVHWYQQKPGQAPVLV |
| | | LYGKNNRPSGVPDRFSGSRSGTTASLTITGAQAEDEADYYCSSRDSSG |
| | | DHLRVFGTGTKVTVL |
| 149368-nt | 156 | CAAGTGCAGCTGGTCCAGTCGGGCGCCGAGGTCAAGAAGCCCGGG |
| ScFv domain | | AGCTCTGTGAAAGTGTCCTGCAAGGCCTCCGGGGGCACCTTTAGCT |
| | | CCTACGCCATCTCCTGGGTCCGCCAAGCACCGGGTCAAGGCCTGGA |
| | | GTGGATGGGGGGAATTATCCCTATCTTCGGCACTGCCAACTACGCC |
| | | CAGAAGTTCCAGGGACGCGTGACCATTACCGCGGACGAATCCACCT |
| | | CCACCGCTTATATGGAGCTGTCCAGCTTGCGCTCGGAAGATACCGC |
| | | CGTGTACTACTGCGCCCGGAGGGGTGGATACCAGCTGCTGAGATGG |
| | | GACGTGGGCCTCCTGCGGTCGGCGTTCGACATCTGGGGCCAGGGCA |
| | | CTATGGTCACTGTGTCCAGCGGAGGAGGCGGATCGGGAGGCGGCG |
| | | GATCAGGGGGAGGCGGTTCCAGCTACGTGCTTACTCAACCCCCTTC |
| | | GGTGTCCGTGGCCCCGGGACAGACCGCCAGAATCACTTGCGGAGGA |
| | | AACAACATTGGGTCCAAGAGCGTGCATTGGTACCAGCAGAAGCCA |
| | | GGACAGGCCCCTGTGCTGGTGCTCTACGGGAAGAACAATCGGCCCA |
| | | GCGGAGTGCCGGACAGGTTCTCGGGTTCACGCTCCGGTACAACCGC |
| | | TTCACTGACTATCACCGGGGCCCAGGCAGAGGATGAAGCGGACTAC |
| | | TACTGTTCCTCCCGGGATTCATCCGGCGACCACCTCCGGGTGTTCGG |
| | | AACCGGAACGAAGGTCACCGTGCTG |
| 149368-aa | 177 | QVQLVQSGAEVKKPGSSVKVSCKASGGTFSSYAISWVRQAPGQGLEW |
| VH | | MGGIIPIFGTANYAQKFQGRVTITADESTSTAYMELSSLRSEDTAVYYC |
| | | ARRGGYQLLRWDVGLLRSAFDIWGQGTMVTVSS |
| 149368-aa | 198 | SYVLTQPPSVSVAPGQTARITCGGNNIGSKSVHWYQQKPGQAPVLVLY |
| VL | | GKNNRPSGVPDRFSGSRSGTTASLTITGAQAEDEADYYCSSRDSSGDH |
| | | LRVFGTGTKVTVL |
| 149368-aa | 219 | MALPVTALLLPLALLLHAARPQVQLVQSGAEVKKPGSSVKVSCKASG |
| Full CAR | | GTFSSYAISWVRQAPGQGLEWMGGIIPIFGTANYAQKFQGRVTITADES |
| | | TSTAYMELSSLRSEDTAVYYCARRGGYQLLRWDVGLLRSAFDIWGQG |
| | | TMVTVSSGGGGSGGGGSGGGGSSYVLTQPPSVSVAPGQTARITCGGN |
| | | NIGSKSVHWYQQKPGQAPVLVLYGKNNRPSGVPDRFSGSRSGTTASLT |
| | | ITGAQAEDEADYYCSSRDSSGDHLRVFGTGTKVTVLTTTPAPRPPTPAP |
| | | TIASQPLSLRPEACRPAAGGAVHTRGLDFACDIYIWAPLAGTCGVLLLS |
| | | LVITLYCKRGRKKLLYIFKQPFMRPVQTTQEEDGCSCRFPEEEEGGCEL |
| | | RVKFSRSADAPAYKQGQNQLYNELNLGRREEYDVLDKRRGRDPEMG |
| | | GKPRRKNPQEGLYNELQKDKMAEAYSEIGMKGERRRGKGHDGLYQG |
| | | LSTATKDTYDALHMQALPPR |
| 149368-nt | 240 | ATGGCCCTCCCTGTCACCGCCCTGCTGCTTCCGCTGGCTCTTCTGCT |
| Full CAR | | CCACGCCGCTCGGCCCCAAGTGCAGCTGGTCCAGTCGGGCGCCGAG |
| | | GTCAAGAAGCCCGGGAGCTCTGTGAAAGTGTCCTGCAAGGCCTCCG |
| | | GGGGCACCTTTAGCTCCTACGCCATCTCCTGGGTCCGCCAAGCACC |
| | | GGGTCAAGGCCTGGAGTGGATGGGGGGAATTATCCCTATCTTCGGC |
| | | ACTGCCAACTACGCCCAGAAGTTCCAGGGACGCGTGACCATTACCG |
| | | CGGACGAATCCACCTCCACCGCTTATATGGAGCTGTCCAGCTTGCG |
| | | CTCGGAAGATACCGCCGTGTACTACTGCGCCCGGAGGGGTGGATAC |
| | | CAGCTGCTGAGATGGGACGTGGGCCTCCTGCGGTCGGCGTTCGACA |
| | | TCTGGGGCCAGGGCACTATGGTCACTGTGTCCAGCGGAGGAGGCGG |
| | | ATCGGGAGGCGGCGGATCAGGGGGAGGCGGTTCCAGCTACGTGCTT |
| | | ACTCAACCCCCTTCGGTGTCCGTGGCCCCGGGACAGACCGCCAGAA |
| | | TCACTTGCGGAGGAAACAACATTGGGTCCAAGAGCGTGCATTGGTA |
| | | CCAGCAGAAGCCAGGACAGGCCCCTGTGCTGGTGCTCTACGGGAAG |
| | | AACAATCGGCCCAGCGGAGTGCCGGACAGGTTCTCGGGTTCACGCT |
| | | CCGGTACAACCGCTTCACTGACTATCACCGGGGCCCAGGCAGAGGA |
| | | TGAAGCGGACTACTACTGTTCCTCCCGGGATTCATCCGGCGACCAC |
| | | CTCCGGGTGTTCGGAACCGGAACGAAGGTCACCGTGCTGACCACTA |
| | | CCCCAGCACCGAGGCCACCCACCCCGGCTCCTACCATCGCCTCCCA |
| | | GCCTCTGTCCCTGCGTCCGGAGGCATGTAGACCCGCAGCTGGTGGG |
| | | GCCGTGCATACCCGGGGTCTTGACTTCGCCTGCGATATCTACATTTG |
| | | GGCCCCTCTGGCTGGTACTTGCGGGGTCCTGCTGCTTTCACTCGTGA |
| | | TCACTCTTTACTGTAAGCGCGGTCGGAAGAAGCTGCTGTACATCTTT |
| | | AAGCAACCCTTCATGAGGCCTGTGCAGACTACTCAAGAGGAGGACG |
| | | GCTGTTCATGCCGGTTCCCAGAGGAGGAGGAAGGCGGCTGCGAACT |
| | | GCGCGTGAAATTCAGCCGCAGCGCAGATGCTCCAGCCTACAAGCAG |
| | | GGGCAGAACCAGCTCTACAACGAACTCAATCTTGGTCGGAGAGAG |
| | | GAGTACGACGTGCTGGACAAGCGGAGAGGACGGGACCCAGAAATG |
| | | GGCGGGAAGCCGCGCAGAAAGAATCCCCAAGAGGGCCTGTACAAC |
| | | GAGCTCCAAAAGGATAAGATGGCAGAAGCCTATAGCGAGATTGGT |
| | | ATGAAAGGGGAACGCAGAAGAGGCAAAGGCCACGACGGACTGTAC |
| | | CAGGGACTCAGCACCGCCACCAAGGACACCTATGACGCTCTTCACA |
| | | TGCAGGCCCTGCCGCCTCGG |

149369

| | | |
|---|---|---|
| 149369-aa | 136 | EVQLQQSGPGLVKPSQTLSLTCAISGDSVSSNSAAWNWIRQSPSRGLE |
| ScFv domain | | WLGRTYYRSKWYSFYAISLKSRIIINPDTSKNQFSLQLKSVTPEDTAVY |
| | | YCARSSPEGLFLYWFDPWGQGTLVTVSSGGDGSGGGGSGGGGSSSEL |
| | | TQDPAVSVALGQTIRITCQGDSLGNYYATWYQQKPGQAPVLVIYGTN |
| | | NRPSGIPDRFSASSSGNTASLTITGAQAEDEADYYCNSRDSSGHHLLFG |
| | | TGTKVTVL |
| 149369-nt | 157 | GAAGTGCAGCTCCAACAGTCAGGACCGGGGCTCGTGAAGCCATCCC |
| ScFv domain | | AGACCCTGTCCCTGACTTGTGCCATCTCGGGAGATAGCGTGTCATC |
| | | GAACTCCGCCGCCTGGAACTGGATTCGGCAGAGCCCGTCCCGCGGA |
| | | CTGGAGTGGCTTGGAAGGACCTACTACCGGTCCAAGTGGTACTCTT |
| | | TCTACGCGATCTCGCTGAAGTCCCGCATTATCATTAACCCTGATACC |
| | | TCCAAGAATCAGTTCTCCCTCCAACTGAAATCCGTCACCCCCGAGG |
| | | ACACAGCAGTGTATTACTGCGCACGGAGCAGCCCCGAAGGACTGTT |
| | | CCTGTATTGGTTTGACCCCTGGGGCCAGGGGACTCTTGTGACCGTGT |
| | | CGAGCGGCGGAGATGGGTCCGGTGGCGGTGGTTCGGGGGGCGGCG |
| | | GATCATCATCCGAACTGACCCAGGACCCGGCTGTGTCCGTGGCGCT |
| | | GGGACAAACCATCCGCATTACGTGCCAGGGAGACTCCCTGGGCAAC |
| | | TACTACGCCACTTGGTACCAGCAGAAGCCGGGCCAAGCCCCTGTGT |
| | | TGGTCATCTACGGGACCAACAACAGACCTTCCGGCATCCCCGACCG |
| | | GTTCAGCGCTTCGTCCTCCGGCAACACTGCCAGCCTGACCATCACTG |
| | | GAGCGCAGGCCGAAGATGAGGCCGACTACTACTGCAACAGCAGAG |
| | | ACTCCTCGGGTCATCACCTCTTGTTCGGAACTGGAACCAAGGTCAC |
| | | CGTGCTG |
| 149369-aa | 178 | EVQLQQSGPGLVKPSQTLSLTCAISGDSVSSNSAAWNWIRQSPSRGLE |
| VH | | WLGRTYYRSKWYSFYAISLKSRIIINPDTSKNQFSLQLKSVTPEDTAVY |
| | | YCARSSPEGLFLYWFDPWGQGTLVTVSS |
| 149369-aa | 199 | SSELTQDPAVSVALGQTIRITCQGDSLGNYYATWYQQKPGQAPVLVIY |
| VL | | GTNNRPSGIPDRFSASSSGNTASLTITGAQAEDEADYYCNSRDSSGHHL |
| | | LFGTGTKVTVL |
| 149369-aa | 220 | MALPVTALLLPLALLLHAARPEVQLQQSGPGLVKPSQTLSLTCAISGDS |
| Full CAR | | VSSNSAAWNWIRQSPSRGLEWLGRTYYRSKWYSFYAISLKSRIIINPDT |
| | | SKNQFSLQLKSVTPEDTAVYYCARSSPEGLFLYWFDPWGQGTLVTVSS |
| | | GGDGSGGGGSGGGGSSSELTQDPAVSVALGQTIRITCQGDSLGNYYAT |
| | | WYQQKPGQAPVLVIYGTNNRPSGIPDRFSASSSGNTASLTITGAQAEDE |
| | | ADYYCNSRDSSGHHLLFGTGTKVTVLTTTPAPRPPTPAPTIASQPLSLRP |
| | | EACRPAAGGAVHTRGLDFACDIYIWAPLAGTCGVLLLSLVITLYCKRG |
| | | RKKLLYIFKQPFMRPVQTTQEEDGCSCRFPEEEEGGCELRVKFSRSADA |
| | | PAYKQGQNQLYNELNLGRREEYDVLDKRRGRDPEMGGKPRRKNPQE |
| | | GLYNELQKDKMAEAYSEIGMKGERRRGKGHDGLYQGLSTATKDTYD |
| | | ALHMQALPPR |
| 149369-nt | 241 | ATGGCCCTCCCTGTCACCGCCCTGCTGCTTCCGCTGGCTCTTCTGCT |
| Full CAR | | CCACGCCGCTCGGCCCGAAGTGCAGCTCCAACAGTCAGGACCGGGG |
| | | CTCGTGAAGCCATCCCAGACCCTGTCCCTGACTTGTGCCATCTCGGG |
| | | AGATAGCGTGTCATCGAACTCCGCCGCCTGGAACTGGATTCGGCAG |
| | | AGCCCGTCCCGCGGACTGGAGTGGCTTGGAAGGACCTACTACCGGT |
| | | CCAAGTGGTACTCTTTCTACGCGATCTCGCTGAAGTCCCGCATTATC |
| | | ATTAACCCTGATACCTCCAAGAATCAGTTCTCCCTCCAACTGAAATC |
| | | CGTCACCCCCGAGGACACAGCAGTGTATTACTGCGCACGGAGCAGC |
| | | CCCGAAGGACTGTTCCTGTATTGGTTTGACCCCTGGGGCCAGGGGA |
| | | CTCTTGTGACCGTGTCGAGCGGCGGAGATGGGTCCGGTGGCGGTGG |
| | | TTCGGGGGGCGGCGGATCATCATCCGAACTGACCCAGGACCCGGCT |
| | | GTGTCCGTGGCGCTGGGACAAACCATCCGCATTACGTGCCAGGGAG |
| | | ACTCCCTGGGCAACTACTACGCCACTTGGTACCAGCAGAAGCCGGG |
| | | CCAAGCCCCTGTGTTGGTCATCTACGGGACCAACAACAGACCTTCC |
| | | GGCATCCCCGACCGGTTCAGCGCTTCGTCCTCCGGCAACACTGCCA |
| | | GCCTGACCATCACTGGAGCGCAGGCCGAAGATGAGGCCGACTACTA |
| | | CTGCAACAGCAGAGACTCCTCGGGTCATCACCTCTTGTTCGGAACT |
| | | GGAACCAAGGTCACCGTGCTGACCACTACCCCAGCACCGAGGCCAC |
| | | CCACCCCGGCTCCTACCATCGCCTCCCAGCCTCTGTCCCTGCGTCCG |
| | | GAGGCATGTAGACCCGCAGCTGGTGGGGCCGTGCATACCCGGGGTC |
| | | TTGACTTCGCCTGCGATATCTACATTTGGGCCCCTCTGGCTGGTACT |
| | | TGCGGGGTCCTGCTGCTTTCACTCGTGATCACTCTTTACTGTAAGCG |
| | | CGGTCGGAAGAAGCTGCTGTACATCTTTAAGCAACCCTTCATGAGG |
| | | CCTGTGCAGACTACTCAAGAGGAGGACGGCTGTTCATGCCGGTTCC |
| | | CAGAGGAGGAGGAAGGCGGCTGCGAACTGCGCGTGAAATTCAGCC |
| | | GCAGCGCAGATGCTCCAGCCTACAAGCAGGGGCAGAACCAGCTCT |
| | | ACAACGAACTCAATCTTGGTCGGAGAGAGGAGTACGACGTGCTGG |
| | | ACAAGCGGAGAGGACGGGACCCAGAAATGGGCGGGAAGCCGCGCA |
| | | GAAAGAATCCCCAAGAGGGCCTGTACAACGAGCTCCAAAAGGATA |
| | | AGATGGCAGAAGCCTATAGCGAGATTGGTATGAAAGGGGAACGCA |
| | | GAAGAGGCAAAGGCCACGACGGACTGTACCAGGGACTCAGCACCG |
| | | CCACCAAGGACACCTATGACGCTCTTCACATGCAGGCCCTGCCGCC |
| | | TCGG |

BCMA_EBB-C1978-A4

| | | |
|---|---|---|
| BCMA_EBB- | 137 | EVQLVESGGGLVQPGGSLRLSCAASGFTFSSYAMSWVRQAPGKGLEW |
| C1978-A4- | | VSAISGSGGSTYYADSVKGRFTISRDNSKNTLYLQMNSLRAEDTAVYY |
| aa | | CAKVEGSGSLDYWGQGTLVTVSSGGGGSGGGGSGGGGSEIVMTQSPG |
| ScFv domain | | TLSLSPGERATLSCRASQSVSSAYLAWYQQKPGQPPRLLISGASTRATG |
| | | IPDRFGGSGSGTDFTLTISRLEPEDFAVYYCQHYGSSFNGSSLFTFGQGT |
| | | RLEIK |
| BCMA_EBB- | 158 | GAAGTGCAGCTCGTGGAGTCAGGAGGCGGCCTGGTCCAGCCGGGA |
| C1978-A4-nt | | GGGTCCCTTAGACTGTCATGCGCCGCAAGCGGATTCACTTTCTCCTC |
| ScFv domain | | CTATGCCATGAGCTGGGTCCGCCAAGCCCCCGGAAAGGGACTGGAA |
| | | TGGGTGTCCGCCATCTCGGGGTCTGGAGGCTCAACTTACTACGCTG |
| | | ACTCCGTGAAGGGACGGTTCACCATTAGCCGCGACAACTCCAAGAA |
| | | CACCCTCTACCTCCAAATGAACTCCCTGCGGGCCGAGGATACCGCC |
| | | GTCTACTACTGCGCCAAAGTGGAAGGTTCAGGATCGCTGGACTACT |
| | | GGGGACAGGGTACTCTCGTGACCGTGTCATCGGGCGGAGGAGGTTC |
| | | CGGCGGTGGCGGCTCCGGCGGCGGAGGGTCGGAGATCGTGATGAC |
| | | CCAGAGCCCTGGTACTCTGAGCCTTTCGCCGGGAGAAAGGGCCACC |
| | | CTGTCCTGCCGCGCTTCCCAATCCGTGTCCTCCGCGTACTTGGCGTG |
| | | GTACCAGCAGAAGCCGGGACAGCCCCCTCGGCTGCTGATCAGCGGG |
| | | GCCAGCACCCGGGCAACCGGAATCCCAGACAGATTCGGGGGTTCCG |
| | | GCAGCGGCACAGATTTCACCCTGACTATTTCGAGGTTGGAGCCCGA |
| | | GGACTTTGCGGTGTATTACTGTCAGCACTACGGGTCGTCCTTTAATG |
| | | GCTCCAGCCTGTTCACGTTCGGACAGGGGACCCGCCTGGAAATCAA |
| | | G |
| BCMA_EBB- | 179 | EVQLVESGGGLVQPGGSLRLSCAASGFTFSSYAMSWVRQAPGKGLEW |
| C1978-A4- | | VSAISGSGGSTYYADSVKGRFTISRDNSKNTLYLQMNSLRAEDTAVYY |
| aa | | CAKVEGSGSLDYWGQGTLVTVSS |
| VH | | |
| BCMA_EBB- | 200 | EIVMTQSPGTLSLSPGERATLSCRASQSVSSAYLAWYQQKPGQPPRLLI |
| C1978-A4- | | SGASTRATGIPDRFGGSGSGTDFTLTISRLEPEDFAVYYCQHYGSSFNGS |
| aa | | SLFTFGQGTRLEIK |
| VL | | |
| BCMA_EBB- | 221 | MALPVTALLLPLALLLHAARPEVQLVESGGGLVQPGGSLRLSCAASGF |
| C1978-A4- | | TFSSYAMSWVRQAPGKGLEWVSAISGSGGSTYYADSVKGRFTISRDNS |
| aa | | KNTLYLQMNSLRAEDTAVYYCAKVEGSGSLDYWGQGTLVTVSSGGG |
| Full CART | | GSGGGGSGGGGSEIVMTQSPGTLSLSPGERATLSCRASQSVSSAYLAW |
| | | YQQKPGQPPRLLISGASTRATGIPDRFGGSGSGTDFTLTISRLEPEDFAV |
| | | YYCQHYGSSFNGSSLFTFGQGTRLEIKTTTPAPRPPTPAPTIASQPLSLRP |
| | | EACRPAAGGAVHTRGLDFACDIYIWAPLAGTCGVLLLSLVITLYCKRG |
| | | RKKLLYIFKQPFMRPVQTTQEEDGCSCRFPEEEEGGCELRVKFSRSADA |
| | | PAYKQGQNQLYNELNLGRREEYDVLDKRRGRDPEMGGKPRRKNPQE |
| | | GLYNELQKDKMAEAYSEIGMKGERRRGKGHDGLYQGLSTATKDTYD |
| | | ALHMQALPPR |
| BCMA_EBB- | 242 | ATGGCCCTCCCTGTCACCGCCCTGCTGCTTCCGCTGGCTCTTCTGCT |
| C1978-A4-nt | | CCACGCCGCTCGGCCCGAAGTGCAGCTCGTGGAGTCAGGAGGCGGC |
| Full CART | | CTGGTCCAGCCGGGAGGGTCCCTTAGACTGTCATGCGCCGCAAGCG |
| | | GATTCACTTTCTCCTCCTATGCCATGAGCTGGGTCCGCCAAGCCCCC |
| | | GGAAAGGGACTGGAATGGGTGTCCGCCATCTCGGGGTCTGGAGGCT |
| | | CAACTTACTACGCTGACTCCGTGAAGGGACGGTTCACCATTAGCCG |
| | | CGACAACTCCAAGAACACCCTCTACCTCCAAATGAACTCCCTGCGG |
| | | GCCGAGGATACCGCCGTCTACTACTGCGCCAAAGTGGAAGGTTCAG |
| | | GATCGCTGGACTACTGGGGACAGGGTACTCTCGTGACCGTGTCATC |
| | | GGGCGGAGGAGGTTCCGGCGGTGGCGGCTCCGGCGGCGGAGGGTC |
| | | GGAGATCGTGATGACCCAGAGCCCTGGTACTCTGAGCCTTTCGCCG |
| | | GGAGAAAGGGCCACCCTGTCCTGCCGCGCTTCCCAATCCGTGTCCT |
| | | CCGCGTACTTGGCGTGGTACCAGCAGAAGCCGGGACAGCCCCCTCG |
| | | GCTGCTGATCAGCGGGGCCAGCACCCGGGCAACCGGAATCCCAGA |
| | | CAGATTCGGGGGTTCCGGCAGCGGCACAGATTTCACCCTGACTATT |
| | | TCGAGGTTGGAGCCCGAGGACTTTGCGGTGTATTACTGTCAGCACT |
| | | ACGGGTCGTCCTTTAATGGCTCCAGCCTGTTCACGTTCGGACAGGG |
| | | GACCCGCCTGGAAATCAAGACCACTACCCCAGCACCGAGGCCACCC |
| | | ACCCCGGCTCCTACCATCGCCTCCCAGCCTCTGTCCCTGCGTCCGGA |
| | | GGCATGTAGACCCGCAGCTGGTGGGGCCGTGCATACCCGGGGTCTT |
| | | GACTTCGCCTGCGATATCTACATTTGGGCCCCTCTGGCTGGTACTTG |
| | | CGGGGTCCTGCTGCTTTCACTCGTGATCACTCTTTACTGTAAGCGCG |
| | | GTCGGAAGAAGCTGCTGTACATCTTTAAGCAACCCTTCATGAGGCC |
| | | TGTGCAGACTACTCAAGAGGAGGACGGCTGTTCATGCCGGTTCCCA |
| | | GAGGAGGAGGAAGGCGGCTGCGAACTGCGCGTGAAATTCAGCCGC |
| | | AGCGCAGATGCTCCAGCCTACAAGCAGGGGCAGAACCAGCTCTAC |
| | | AACGAACTCAATCTTGGTCGGAGAGAGGAGTACGACGTGCTGGAC |
| | | AAGCGGAGAGGACGGGACCCAGAAATGGGCGGGAAGCCGCGCAG |
| | | AAAGAATCCCCAAGAGGGCCTGTACAACGAGCTCCAAAAGGATAA |
| | | GATGGCAGAAGCCTATAGCGAGATTGGTATGAAAGGGGAACGCAG |
| | | AAGAGGCAAAGGCCACGACGGACTGTACCAGGGACTCAGCACCGC |
| | | CACCAAGGACACCTATGACGCTCTTCACATGCAGGCCCTGCCGCCT |
| | | CGG |

BCMA_EBB-C1978-G1

| | | |
|---|---|---|
| BCMA_EBB- | 138 | EVQLVETGGGLVQPGGSLRLSCAASGITFSRYPMSWVRQAPGKGLEW |
| C1978-G1- | | VSGISDSGVSTYYADSAKGRFTISRDNSKNTLFLQMSSLRDEDTAVYY |
| aa | | CVTRAGSEASDIWGQGTMVTVSSGGGGSGGGGSGGGGSEIVLTQSPAT |
| ScFv domain | | LSLSPGERATLSCRASQSVSNSLAWYQQKPGQAPRLLIYDASSRATGIP |
| | | DRFSGSGSGTDFTLTISRLEPEDFAIYYCQQFGTSSGLTFGGGTKLEIK |
| BCMA_EBB | 159 | GAAGTGCAACTGGTGGAAACCGGTGGCGGCCTGGTGCAGCCTGGA |
| C1978-G1 - | | GGATCATTGAGGCTGTCATGCGCGGCCAGCGGTATTACCTTCTCCC |
| nt | | GGTACCCCATGTCCTGGGTCAGACAGGCCCCGGGGAAAGGGCTTGA |
| ScFv domain | | ATGGGTGTCCGGGATCTCGGACTCCGGTGTCAGCACTTACTACGCC |
| | | GACTCCGCCAAGGGACGCTTCACCATTTCCCGGGACAACTCGAAGA |
| | | ACACCCTGTTCCTCCAAATGAGCTCCCTCCGGGACGAGGATACTGC |
| | | AGTGTACTACTGCGTGACCCGCGCCGGGTCCGAGGCGTCTGACATT |
| | | TGGGGACAGGGCACTATGGTCACCGTGTCGTCCGGCGGAGGGGGCT |
| | | CGGGAGGCGGTGGCAGCGGAGGAGGAGGGTCCGAGATCGTGCTGA |
| | | CCCAATCCCCGGCCACCCTCTCGCTGAGCCCTGGAGAAAGGGCAAC |
| | | CTTGTCCTGTCGCGCGAGCCAGTCCGTGAGCAACTCCCTGGCCTGGT |
| | | ACCAGCAGAAGCCCGGACAGGCTCCGAGACTTCTGATCTACGACGC |
| | | TTCGAGCCGGGCCACTGGAATCCCCGACCGCTTTTCGGGGTCCGGC |
| | | TCAGGAACCGATTTCACCCTGACAATCTCACGGCTGGAGCCAGAGG |
| | | ATTTCGCCATCTATTACTGCCAGCAGTTCGGTACTTCCTCCGGCCTG |
| | | ACTTTCGGAGGCGGCACGAAGCTCGAAATCAAG |
| BCMA_EBB- | 180 | EVQLVETGGGLVQPGGSLRLSCAASGITFSRYPMSWVRQAPGKGLEW |
| C1978-G1- | | VSGISDSGVSTYYADSAKGRFTISRDNSKNTLFLQMSSLRDEDTAVYY |
| aa | | CVTRAGSEASDIWGQGTMVTVSS |
| VH | | |
| BCMA_EBB- | 201 | EIVLTQSPATLSLSPGERATLSCRASQSVSNSLAWYQQKPGQAPRLLIY |
| C1978-G1- | | DASSRATGIPDRFSGSGSGTDFTLTISRLEPEDFAIYYCQQFGTSSGLTFG |
| aa | | GGTKLEIK |
| VL | | |
| BCMA_EBB- | 222 | MALPVTALLLPLALLLHAARPEVQLVETGGGLVQPGGSLRLSCAASGI |
| C1978-G1- | | TFSRYPMSWVRQAPGKGLEWVSGISDSGVSTYYADSAKGRFTISRDNS |
| aa | | KNTLFLQMSSLRDEDTAVYYCVTRAGSEASDIWGQGTMVTVSSGGGG |
| Full CART | | SGGGGSGGGGSEIVLTQSPATLSLSPGERATLSCRASQSVSNSLAWYQQ |
| | | KPGQAPRLLIYDASSRATGIPDRFSGSGSGTDFTLTISRLEPEDFAIYYCQ |
| | | QFGTSSGLTFGGGTKLEIKTTTPAPRPPTPAPTIASQPLSLRPEACRPAAG |
| | | GAVHTRGLDFACDIYIWAPLAGTCGVLLLSLVITLYCKRGRKKLLYIFK |
| | | QPFMRPVQTTQEEDGCSCRFPEEEEGGCELRVKFSRSADAPAYKQGQN |
| | | QLYNELNLGRREEYDVLDKRRGRDPEMGGKPRRKNPQEGLYNELQK |
| | | DKMAEAYSEIGMKGERRRGKGHDGLYQGLSTATKDTYDALHMQALP |
| | | PR |
| BCMA_EBB- | 243 | ATGGCCCTCCCTGTCACCGCCCTGCTGCTTCCGCTGGCTCTTCTGCT |
| C1978-G1- | | CCACGCCGCTCGGCCCGAAGTGCAACTGGTGGAAACCGGTGGCGGC |
| nt | | CTGGTGCAGCCTGGAGGATCATTGAGGCTGTCATGCGCGGCCAGCG |
| Full CART | | GTATTACCTTCTCCCGGTACCCCATGTCCTGGGTCAGACAGGCCCCG |
| | | GGGAAAGGGCTTGAATGGGTGTCCGGGATCTCGGACTCCGGTGTCA |
| | | GCACTTACTACGCCGACTCCGCCAAGGGACGCTTCACCATTTCCCG |
| | | GGACAACTCGAAGAACACCCTGTTCCTCCAAATGAGCTCCCTCCGG |
| | | GACGAGGATACTGCAGTGTACTACTGCGTGACCCGCGCCGGGTCCG |
| | | AGGCGTCTGACATTTGGGGACAGGGCACTATGGTCACCGTGTCGTC |
| | | CGGCGGAGGGGGCTCGGGAGGCGGTGGCAGCGGAGGAGGAGGGTC |
| | | CGAGATCGTGCTGACCCAATCCCCGGCCACCCTCTCGCTGAGCCCT |
| | | GGAGAAAGGGCAACCTTGTCCTGTCGCGCGAGCCAGTCCGTGAGCA |
| | | ACTCCCTGGCCTGGTACCAGCAGAAGCCCGGACAGGCTCCGAGACT |
| | | TCTGATCTACGACGCTTCGAGCCGGGCCACTGGAATCCCCGACCGC |
| | | TTTTCGGGGTCCGGCTCAGGAACCGATTTCACCCTGACAATCTCACG |
| | | GCTGGAGCCAGAGGATTTCGCCATCTATTACTGCCAGCAGTTCGGT |
| | | ACTTCCTCCGGCCTGACTTTCGGAGGCGGCACGAAGCTCGAAATCA |
| | | AGACCACTACCCCAGCACCGAGGCCACCCACCCCGGCTCCTACCAT |
| | | CGCCTCCCAGCCTCTGTCCCTGCGTCCGGAGGCATGTAGACCCGCA |
| | | GCTGGTGGGGCCGTGCATACCCGGGGTCTTGACTTCGCCTGCGATA |
| | | TCTACATTTGGGCCCCTCTGGCTGGTACTTGCGGGGTCCTGCTGCTT |
| | | TCACTCGTGATCACTCTTTACTGTAAGCGCGGTCGGAAGAAGCTGC |
| | | TGTACATCTTTAAGCAACCCTTCATGAGGCCTGTGCAGACTACTCAA |
| | | GAGGAGGACGGCTGTTCATGCCGGTTCCCAGAGGAGGAGGAAGGC |
| | | GGCTGCGAACTGCGCGTGAAATTCAGCCGCAGCGCAGATGCTCCAG |
| | | CCTACAAGCAGGGGCAGAACCAGCTCTACAACGAACTCAATCTTGG |
| | | TCGGAGAGAGGAGTACGACGTGCTGGACAAGCGGAGAGGACGGGA |
| | | CCCAGAAATGGGCGGGAAGCCGCGCAGAAAGAATCCCCAAGAGGG |
| | | CCTGTACAACGAGCTCCAAAAGGATAAGATGGCAGAAGCCTATAG |
| | | CGAGATTGGTATGAAAGGGGAACGCAGAAGAGGCAAAGGCCACGA |
| | | CGGACTGTACCAGGGACTCAGCACCGCCACCAAGGACACCTATGAC |
| | | GCTCTTCACATGCAGGCCCTGCCGCCTCGG |

BCMA_EBB-C1979-C1

| | | |
|---|---|---|
| BCMA_EBB- | 139 | QVQLVESGGGLVQPGGSLRLSCAASGFTFSSYAMSWVRQAPGKGLEW |
| C1979-C1- | | VSAISGSGGSTYYADSVKGRFTISRDNAKNSLYLQMNSLRAEDTAIYY |
| aa | | CARATYKRELRYYYGMDVWGQGTMVTVSSGGGGSGGGGSGGGGSEI |
| ScFv domain | | VMTQSPGTVSLSPGERATLSCRASQSVSSSFLAWYQQKPGQAPRLLIY |
| | | GASSRATGIPDRFSGSGSGTDFTLTISRLEPEDSAVYYCQQYHSSPSWTF |
| | | GQGTRLEIK |
| BCMA_EBB- | 160 | CAAGTGCAGCTCGTGGAATCGGGTGGCGGACTGGTGCAGCCGGGG |
| C1979-C1-nt | | GGCTCACTTAGACTGTCCTGCGCGGCCAGCGGATTCACTTTCTCCTC |
| ScFv domain | | CTACGCCATGTCCTGGGTCAGACAGGCCCCTGGAAAGGGCCTGGAA |
| | | TGGGTGTCCGCAATCAGCGGCAGCGGCGGCTCGACCTATTACGCGG |
| | | ATTCAGTGAAGGGCAGATTCACCATTTCCCGGGACAACGCCAAGAA |
| | | CTCCTTGTACCTTCAAATGAACTCCCTCCGCGCGGAAGATACCGCA |
| | | ATCTACTACTGCGCTCGGGCCACTTACAAGAGGGAACTGCGCTACT |
| | | ACTACGGGATGGACGTCTGGGGCCAGGGAACCATGGTCACCGTGTC |
| | | CAGCGGAGGAGGAGGATCGGGAGGAGGCGGTAGCGGGGGTGGAG |
| | | GGTCGGAGATCGTGATGACCCAGTCCCCCGGCACTGTGTCGCTGTC |
| | | CCCCGGCGAACGGGCCACCCTGTCATGTCGGGCCAGCCAGTCAGTG |
| | | TCGTCAAGCTTCCTCGCCTGGTACCAGCAGAAACCGGGACAAGCTC |
| | | CCCGCCTGCTGATCTACGGAGCCAGCAGCCGGGCCACCGGTATTCC |
| | | TGACCGGTTCTCCGGTTCGGGGTCCGGGACCGACTTTACTCTGACTA |
| | | TCTCTCGCCTCGAGCCAGAGGACTCCGCCGTGTATTACTGCCAGCA |
| | | GTACCACTCCTCCCCGTCCTGGACGTTCGGACAGGGCACAAGGCTG |
| | | GAGATTAAG |
| BCMA_EBB- | 181 | QVQLVESGGGLVQPGGSLRLSCAASGFTFSSYAMSWVRQAPGKGLEW |
| C1979-C1- | | VSAISGSGGSTYYADSVKGRFTISRDNAKNSLYLQMNSLRAEDTAIYY |
| aa | | CARATYKRELRYYYGMDVWGQGTMVTVSS |
| VH | | |
| BCMA_EBB- | 202 | EIVMTQSPGTVSLSPGERATLSCRASQSVSSSFLAWYQQKPGQAPRLLI |
| C1979-C1- | | YGASSRATGIPDRFSGSGSGTDFTLTISRLEPEDSAVYYCQQYHSSPSW |
| a | | TFGQGTRLEIK |
| VL | | |
| BCMA_EBB- | 223 | MALPVTALLLPLALLLHAARPQVQLVESGGGLVQPGGSLRLSCAASGF |
| C1979-C1- | | TFSSYAMSWVRQAPGKGLEWVSAISGSGGSTYYADSVKGRFTISRDNA |
| aa | | KNSLYLQMNSLRAEDTAIYYCARATYKRELRYYYGMDVWGQGTMV |
| Full CART | | TVSSGGGGSGGGGSGGGGSEIVMTQSPGTVSLSPGERATLSCRASQSVS |
| | | SSFLAWYQQKPGQAPRLLIYGASSRATGIPDRFSGSGSGTDFTLTISRLE |
| | | PEDSAVYYCQQYHSSPSWTFGQGTRLEIKTTTPAPRPPTPAPTIASQPLS |
| | | LRPEACRPAAGGAVHTRGLDFACDIYIWAPLAGTCGVLLLSLVITLYC |
| | | KRGRKKLLYIFKQPFMRPVQTTQEEDGCSCRFPEEEEGGCELRVKFSRS |
| | | ADAPAYKQGQNQLYNELNLGRREEYDVLDKRRGRDPEMGGKPRRKN |
| | | PQEGLYNELQKDKMAEAYSEIGMKGERRRGKGHDGLYQGLSTATKD |
| | | TYDALHMQALPPR |
| BCMA_EBB- | 244 | ATGGCCCTCCCTGTCACCGCCCTGCTGCTTCCGCTGGCTCTTCTGCT |
| C1979-C1-nt | | CCACGCCGCTCGGCCCCAAGTGCAGCTCGTGGAATCGGGTGGCGGA |
| Full CART | | CTGGTGCAGCCGGGGGGCTCACTTAGACTGTCCTGCGCGGCCAGCG |
| | | GATTCACTTTCTCCTCCTACGCCATGTCCTGGGTCAGACAGGCCCCT |
| | | GGAAAGGGCCTGGAATGGGTGTCCGCAATCAGCGGCAGCGGCGGC |
| | | TCGACCTATTACGCGGATTCAGTGAAGGGCAGATTCACCATTTCCC |
| | | GGGACAACGCCAAGAACTCCTTGTACCTTCAAATGAACTCCCTCCG |
| | | CGCGGAAGATACCGCAATCTACTACTGCGCTCGGGCCACTTACAAG |
| | | AGGGAACTGCGCTACTACTACGGGATGGACGTCTGGGGCCAGGGA |
| | | ACCATGGTCACCGTGTCCAGCGGAGGAGGAGGATCGGGAGGAGGC |
| | | GGTAGCGGGGGTGGAGGGTCGGAGATCGTGATGACCCAGTCCCCC |
| | | GGCACTGTGTCGCTGTCCCCCGGCGAACGGGCCACCCTGTCATGTC |
| | | GGGCCAGCCAGTCAGTGTCGTCAAGCTTCCTCGCCTGGTACCAGCA |
| | | GAAACCGGGACAAGCTCCCCGCCTGCTGATCTACGGAGCCAGCAGC |
| | | CGGGCCACCGGTATTCCTGACCGGTTCTCCGGTTCGGGGTCCGGGA |
| | | CCGACTTTACTCTGACTATCTCTCGCCTCGAGCCAGAGGACTCCGCC |
| | | GTGTATTACTGCCAGCAGTACCACTCCTCCCCGTCCTGGACGTTCGG |
| | | ACAGGGCACAAGGCTGGAGATTAAGACCACTACCCCAGCACCGAG |
| | | GCCACCCACCCCGGCTCCTACCATCGCCTCCCAGCCTCTGTCCCTGC |
| | | GTCCGGAGGCATGTAGACCCGCAGCTGGTGGGGCCGTGCATACCCG |
| | | GGGTCTTGACTTCGCCTGCGATATCTACATTTGGGCCCCTCTGGCTG |
| | | GTACTTGCGGGGTCCTGCTGCTTTCACTCGTGATCACTCTTTACTGT |
| | | AAGCGCGGTCGGAAGAAGCTGCTGTACATCTTTAAGCAACCCTTCA |
| | | TGAGGCCTGTGCAGACTACTCAAGAGGAGGACGGCTGTTCATGCCG |
| | | GTTCCCAGAGGAGGAGGAAGGCGGCTGCGAACTGCGCGTGAAATT |
| | | CAGCCGCAGCGCAGATGCTCCAGCCTACAAGCAGGGGCAGAACCA |
| | | GCTCTACAACGAACTCAATCTTGGTCGGAGAGAGGAGTACGACGTG |
| | | CTGGACAAGCGGAGAGGACGGGACCCAGAAATGGGCGGGAAGCCG |
| | | CGCAGAAAGAATCCCCAAGAGGGCCTGTACAACGAGCTCCAAAAG |
| | | GATAAGATGGCAGAAGCCTATAGCGAGATTGGTATGAAAGGGGAA |
| | | CGCAGAAGAGGCAAAGGCCACGACGGACTGTACCAGGGACTCAGC |
| | | ACCGCCACCAAGGACACCTATGACGCTCTTCACATGCAGGCCCTGC |
| | | CGCCTCGG |

BCMA_EBB-C1978-C7

| | | |
|---|---|---|
| BCMA_EBB- | 140 | EVQLVETGGGLVQPGGSLRLSCAASGFTFSSYAMSWVRQAPGKGLEW |
| C1978-C7- | | VSAISGSGGSTYYADSVKGRFTISRDNSKNTLYLQMNTLKAEDTAVYY |
| aa | | CARATYKRELRYYYGMDVWGQGTTVTVSSGGGGSGGGGSGGGGSEI |
| ScFv domain | | VLTQSPSTLSLSPGESATLSCRASQSVSTTFLAWYQQKPGQAPRLLIYG |
| | | SSNRATGIPDRFSGSGSGTDFTLTIRRLEPEDFAVYYCQQYHSSPSWTFG |
| | | QGTKVEIK |
| BCMA_EBB- | 161 | GAGGTGCAGCTTGTGGAAACCGGTGGCGGACTGGTGCAGCCCGGA |
| C1978-C7-nt | | GGAAGCCTCAGGCTGTCCTGCGCCGCGTCCGGCTTCACCTTCTCCTC |
| ScFv domain | | GTACGCCATGTCCTGGGTCCGCCAGGCCCCCGGAAAGGGCCTGGAA |
| | | TGGGTGTCCGCCATCTCTGGAAGCGGAGGTTCCACGTACTACGCGG |
| | | ACAGCGTCAAGGGAAGGTTCACAATCTCCCGCGATAATTCGAAGAA |
| | | CACTCTGTACCTTCAAATGAACACCCTGAAGGCCGAGGACACTGCT |
| | | GTGTACTACTGCGCACGGGCCACCTACAAGAGAGAGCTCCGGTACT |
| | | ACTACGGAATGGACGTCTGGGGCCAGGGAACTACTGTGACCGTGTC |
| | | CTCGGGAGGGGGTGGCTCCGGGGGGGGCGGCTCCGGCGGAGGCGG |
| | | TTCCGAGATTGTGCTGACCCAGTCACCTTCAACTCTGTCGCTGTCCC |
| | | CGGGAGAGAGCGCTACTCTGAGCTGCCGGGCCAGCCAGTCCGTGTC |
| | | CACCACCTTCCTCGCCTGGTATCAGCAGAAGCCGGGGCAGGCACCA |
| | | CGGCTCTTGATCTACGGGTCAAGCAACAGAGCGACCGGAATTCCTG |
| | | ACCGCTTCTCGGGGAGCGGTTCAGGCACCGACTTCACCCTGACTAT |
| | | CCGGCGCCTGGAACCCGAAGATTTCGCCGTGTATTACTGTCAACAG |
| | | TACCACTCCTCGCCGTCCTGGACCTTTGGCCAAGGAACCAAAGTGG |
| | | AAATCAAG |
| BCMA_EBB- | 182 | EVQLVETGGGLVQPGGSLRLSCAASGFTFSSYAMSWVRQAPGKGLEW |
| C1978-C7- | | VSAISGSGGSTYYADSVKGRFTISRDNSKNTLYLQMNTLKAEDTAVYY |
| aa | | CARATYKRELRYYYGMDVWGQGTTVTVSS |
| VH | | |
| BCMA_EBB- | 203 | EIVLTQSPSTLSLSPGESATLSCRASQSVSTTFLAWYQQKPGQAPRLLIY |
| C1978-C7- | | GSSNRATGIPDRFSGSGSGTDFTLTIRRLEPEDFAVYYCQQYHSSPSWTF |
| aa | | GQGTKVEIK |
| VL | | |
| BCMA_EBB- | 224 | MALPVTALLLPLALLLHAARPEVQLVETGGGLVQPGGSLRLSCAASGF |
| C1978-C7- | | TFSSYAMSWVRQAPGKGLEWVSAISGSGGSTYYADSVKGRFTISRDNS |
| aa | | KNTLYLQMNTLKAEDTAVYYCARATYKRELRYYYGMDVWGQGTTV |
| Full CART | | TVSSGGGGSGGGGSGGGGSEIVLTQSPSTLSLSPGESATLSCRASQSVST |
| | | TFLAWYQQKPGQAPRLLIYGSSNRATGIPDRFSGSGSGTDFTLTIRRLEP |
| | | EDFAVYYCQQYHSSPSWTFGQGTKVEIKTTTPAPRPPTPAPTIASQPLSL |
| | | RPEACRPAAGGAVHTRGLDFACDIYIWAPLAGTCGVLLLSLVITLYCK |
| | | RGRKKLLYIFKQPFMRPVQTTQEEDGCSCRFPEEEEGGCELRVKFSRSA |
| | | DAPAYKQGQNQLYNELNLGRREEYDVLDKRRGRDPEMGGKPRRKNP |
| | | QEGLYNELQKDKMAEAYSEIGMKGERRRGKGHDGLYQGLSTATKDT |
| | | YDALHMQALPPR |
| BCMA_EBB- | 245 | ATGGCCCTCCCTGTCACCGCCCTGCTGCTTCCGCTGGCTCTTCTGCT |
| C1978-C7-nt | | CCACGCCGCTCGGCCCGAGGTGCAGCTTGTGGAAACCGGTGGCGGA |
| Full CART | | CTGGTGCAGCCCGGAGGAAGCCTCAGGCTGTCCTGCGCCGCGTCCG |
| | | GCTTCACCTTCTCCTCGTACGCCATGTCCTGGGTCCGCCAGGCCCCC |
| | | GGAAAGGGCCTGGAATGGGTGTCCGCCATCTCTGGAAGCGGAGGTT |
| | | CCACGTACTACGCGGACAGCGTCAAGGGAAGGTTCACAATCTCCCG |
| | | CGATAATTCGAAGAACACTCTGTACCTTCAAATGAACACCCTGAAG |
| | | GCCGAGGACACTGCTGTGTACTACTGCGCACGGGCCACCTACAAGA |
| | | GAGAGCTCCGGTACTACTACGGAATGGACGTCTGGGGCCAGGGAA |
| | | CTACTGTGACCGTGTCCTCGGGAGGGGGTGGCTCCGGGGGGGGCGG |
| | | CTCCGGCGGAGGCGGTTCCGAGATTGTGCTGACCCAGTCACCTTCA |
| | | ACTCTGTCGCTGTCCCCGGGAGAGAGCGCTACTCTGAGCTGCCGGG |
| | | CCAGCCAGTCCGTGTCCACCACCTTCCTCGCCTGGTATCAGCAGAA |
| | | GCCGGGGCAGGCACCACGGCTCTTGATCTACGGGTCAAGCAACAGA |
| | | GCGACCGGAATTCCTGACCGCTTCTCGGGGAGCGGTTCAGGCACCG |
| | | ACTTCACCCTGACTATCCGGCGCCTGGAACCCGAAGATTTCGCCGT |
| | | GTATTACTGTCAACAGTACCACTCCTCGCCGTCCTGGACCTTTGGCC |
| | | AAGGAACCAAAGTGGAAATCAAGACCACTACCCCAGCACCGAGGC |
| | | CACCCACCCCGGCTCCTACCATCGCCTCCCAGCCTCTGTCCCTGCGT |
| | | CCGGAGGCATGTAGACCCGCAGCTGGTGGGGCCGTGCATACCCGGG |
| | | GTCTTGACTTCGCCTGCGATATCTACATTTGGGCCCCTCTGGCTGGT |
| | | ACTTGCGGGGTCCTGCTGCTTTCACTCGTGATCACTCTTTACTGTAA |
| | | GCGCGGTCGGAAGAAGCTGCTGTACATCTTTAAGCAACCCTTCATG |
| | | AGGCCTGTGCAGACTACTCAAGAGGAGGACGGCTGTTCATGCCGGT |
| | | TCCCAGAGGAGGAGGAAGGCGGCTGCGAACTGCGCGTGAAATTCA |
| | | GCCGCAGCGCAGATGCTCCAGCCTACAAGCAGGGGCAGAACCAGC |
| | | TCTACAACGAACTCAATCTTGGTCGGAGAGAGGAGTACGACGTGCT |
| | | GGACAAGCGGAGAGGACGGGACCCAGAAATGGGCGGGAAGCCGC |
| | | GCAGAAAGAATCCCCAAGAGGGCCTGTACAACGAGCTCCAAAAGG |
| | | ATAAGATGGCAGAAGCCTATAGCGAGATTGGTATGAAAGGGGAAC |
| | | GCAGAAGAGGCAAAGGCCACGACGGACTGTACCAGGGACTCAGCA |
| | | CCGCCACCAAGGACACCTATGACGCTCTTCACATGCAGGCCCTGCC |
| | | GCCTCGG |

BCMA_EBB-C1978-D10

| | | |
|---|---|---|
| BCMA_EBB- | 141 | EVQLVETGGGLVQPGRSLRLSCAASGFTFDDYAMHWVRQAPGKGLE |
| C1978-D10- | | WVSGISWNSGSIGYADSVKGRFTISRDNAKNSLYLQMNSLRDEDTAVY |
| aa | | YCARVGKAVPDVWGQGTTVTVSSGGGGSGGGGSGGGGSDIVMTQTP |
| ScFv domain | | SSLSASVGDRVTITCRASQSISSYLNWYQQKPGKAPKLLIYAASSLQSG |
| | | VPSRFSGSGSGTDFTLTISSLQPEDFATYYCQQSYSTPYSFGQGTRLEIK |
| BCMA_EBB- | 162 | GAAGTGCAGCTCGTGGAAACTGGAGGTGGACTCGTGCAGCCTGGAC |
| C1978-D10- | | GGTCGCTGCGGCTGAGCTGCGCTGCATCCGGCTTCACCTTCGACGA |
| nt | | TTATGCCATGCACTGGGTCAGACAGGCGCCAGGGAAGGGACTTGAG |
| ScFv domain | | TGGGTGTCCGGTATCAGCTGGAATAGCGGCTCAATCGGATACGCGG |
| | | ACTCCGTGAAGGGAAGGTTCACCATTTCCCGCGACAACGCCAAGAA |
| | | CTCCCTGTACTTGCAAATGAACAGCCTCCGGGATGAGGACACTGCC |
| | | GTGTACTACTGCGCCCGCGTCGGAAAAGCTGTGCCCGACGTCTGGG |
| | | GCCAGGGAACCACTGTGACCGTGTCCAGCGGCGGGGGTGGATCGG |
| | | GCGGTGGAGGGTCCGGTGGAGGGGGCTCAGATATTGTGATGACCCA |
| | | GACCCCCTCGTCCCTGTCCGCCTCGGTCGGCGACCGCGTGACTATCA |
| | | CATGTAGAGCCTCGCAGAGCATCTCCAGCTACCTGAACTGGTATCA |
| | | GCAGAAGCCGGGGAAGGCCCCGAAGCTCCTGATCTACGCGGCATC |
| | | ATCACTGCAATCGGGAGTGCCGAGCCGGTTTTCCGGGTCCGGCTCC |
| | | GGCACCGACTTCACGCTGACCATTTCTTCCCTGCAACCCGAGGACTT |
| | | CGCCACTTACTACTGCCAGCAGTCCTACTCCACCCCTTACTCCTTCG |
| | | GCCAAGGAACCAGGCTGGAAATCAAG |
| BCMA_EBB- | 183 | EVQLVETGGGLVQPGRSLRLSCAASGFTFDDYAMHWVRQAPGKGLE |
| C1978-D10- | | WVSGISWNSGSIGYADSVKGRFTISRDNAKNSLYLQMNSLRDEDTAVY |
| aa | | YCARVGKAVPDVWGQGTTVTVSS |
| VH | | |
| BCMA_EBB- | 204 | DIVMTQTPSSLSASVGDRVTITCRASQSISSYLNWYQQKPGKAPKLLIY |
| C1978-D10- | | AASSLQSGVPSRFSGSGSGTDFTLTISSLQPEDFATYYCQQSYSTPYSFG |
| aa | | QGTRLEIK |
| VL | | |
| BCMA_EBB- | 225 | MALPVTALLLPLALLLHAARPEVQLVETGGGLVQPGRSLRLSCAASGF |
| C1978-D10- | | TFDDYAMHWVRQAPGKGLEWVSGISWNSGSIGYADSVKGRFTISRDN |
| aa | | AKNSLYLQMNSLRDEDTAVYYCARVGKAVPDVWGQGTTVTVSSGGG |
| Full CART | | GSGGGGSGGGGSDIVMTQTPSSLSASVGDRVTITCRASQSISSYLNWYQ |
| | | QKPGKAPKLLIYAASSLQSGVPSRFSGSGSGTDFTLTISSLQPEDFATYY |
| | | CQQSYSTPYSFGQGTRLEIKTTTPAPRPPTPAPTIASQPLSLRPEACRPAA |
| | | GGAVHTRGLDFACDIYIWAPLAGTCGVLLLSLVITLYCKRGRKKLLYIF |
| | | KQPFMRPVQTTQEEDGCSCRFPEEEEGGCELRVKFSRSADAPAYKQGQ |
| | | NQLYNELNLGRREEYDVLDKRRGRDPEMGGKPRRKNPQEGLYNELQ |
| | | KDKMAEAYSEIGMKGERRRGKGHDGLYQGLSTATKDTYDALHMQAL |
| | | PPR |
| BCMA_EBB- | 246 | ATGGCCCTCCCTGTCACCGCCCTGCTGCTTCCGCTGGCTCTTCTGCT |
| C1978-D10- | | CCACGCCGCTCGGCCCGAAGTGCAGCTCGTGGAAACTGGAGGTGGA |
| nt | | CTCGTGCAGCCTGGACGGTCGCTGCGGCTGAGCTGCGCTGCATCCG |
| Full CART | | GCTTCACCTTCGACGATTATGCCATGCACTGGGTCAGACAGGCGCC |
| | | AGGGAAGGGACTTGAGTGGGTGTCCGGTATCAGCTGGAATAGCGG |
| | | CTCAATCGGATACGCGGACTCCGTGAAGGGAAGGTTCACCATTTCC |
| | | CGCGACAACGCCAAGAACTCCCTGTACTTGCAAATGAACAGCCTCC |
| | | GGGATGAGGACACTGCCGTGTACTACTGCGCCCGCGTCGGAAAAGC |
| | | TGTGCCCGACGTCTGGGGCCAGGGAACCACTGTGACCGTGTCCAGC |
| | | GGCGGGGGTGGATCGGGCGGTGGAGGGTCCGGTGGAGGGGGCTCA |
| | | GATATTGTGATGACCCAGACCCCCTCGTCCCTGTCCGCCTCGGTCGG |
| | | CGACCGCGTGACTATCACATGTAGAGCCTCGCAGAGCATCTCCAGC |
| | | TACCTGAACTGGTATCAGCAGAAGCCGGGGAAGGCCCCGAAGCTCC |
| | | TGATCTACGCGGCATCATCACTGCAATCGGGAGTGCCGAGCCGGTT |
| | | TTCCGGGTCCGGCTCCGGCACCGACTTCACGCTGACCATTTCTTCCC |
| | | TGCAACCCGAGGACTTCGCCACTTACTACTGCCAGCAGTCCTACTCC |
| | | ACCCCTTACTCCTTCGGCCAAGGAACCAGGCTGGAAATCAAGACCA |
| | | CTACCCCAGCACCGAGGCCACCCACCCCGGCTCCTACCATCGCCTC |
| | | CCAGCCTCTGTCCCTGCGTCCGGAGGCATGTAGACCCGCAGCTGGT |
| | | GGGGCCGTGCATACCCGGGGTCTTGACTTCGCCTGCGATATCTACA |
| | | TTTGGGCCCCTCTGGCTGGTACTTGCGGGGTCCTGCTGCTTTCACTC |
| | | GTGATCACTCTTTACTGTAAGCGCGGTCGGAAGAAGCTGCTGTACA |
| | | TCTTTAAGCAACCCTTCATGAGGCCTGTGCAGACTACTCAAGAGGA |
| | | GGACGGCTGTTCATGCCGGTTCCCAGAGGAGGAGGAAGGCGGCTG |
| | | CGAACTGCGCGTGAAATTCAGCCGCAGCGCAGATGCTCCAGCCTAC |
| | | AAGCAGGGGCAGAACCAGCTCTACAACGAACTCAATCTTGGTCGGA |
| | | GAGAGGAGTACGACGTGCTGGACAAGCGGAGAGGACGGGACCCAG |
| | | AAATGGGCGGGAAGCCGCGCAGAAAGAATCCCCAAGAGGGCCTGT |
| | | ACAACGAGCTCCAAAAGGATAAGATGGCAGAAGCCTATAGCGAGA |
| | | TTGGTATGAAAGGGGAACGCAGAAGAGGCAAAGGCCACGACGGAC |
| | | TGTACCAGGGACTCAGCACCGCCACCAAGGACACCTATGACGCTCT |
| | | TCACATGCAGGCCCTGCCGCCTCGG |

BCMA_EBB-C1979-C12

| | | |
|---|---|---|
| BCMA_EBB- | 142 | EVQLVESGGGLVQPGRSLRLSCTASGFTFDDYAMHWVRQRPGKGLE |
| C1979-C12- | | WVASINWKGNSLAYGDSVKGRFAISRDNAKNTVFLQMNSLRTEDTAV |
| aa | | YYCASHQGVAYYNYAMDVWGRGTLVTVSSGGGGSGGGGSGGGGSEI |
| ScFv domain | | VLTQSPGTLSLSPGERATLSCRATQSIGSSFLAWYQQRPGQAPRLLIYG |
| | | ASQRATGIPDRFSGRGSGTDFTLTISRVEPEDSAVYYCQHYESSPSWTF |
| | | GQGTKVEIK |
| BCMA_EBB- | 163 | GAAGTGCAGCTCGTGGAGAGCGGGGGAGGATTGGTGCAGCCCGGA |
| C1979-C12- | | AGGTCCCTGCGGCTCTCCTGCACTGCGTCTGGCTTCACCTTCGACGA |
| nt | | CTACGCGATGCACTGGGTCAGACAGCGCCCGGGAAAGGGCCTGGA |
| ScFv domain | | ATGGGTCGCCTCAATCAACTGGAAGGGAAACTCCCTGGCCTATGGC |
| | | GACAGCGTGAAGGGCCGCTTCGCCATTTCGCGCGACAACGCCAAGA |
| | | ACACCGTGTTTCTGCAAATGAATTCCCTGCGGACCGAGGATACCGC |
| | | TGTGTACTACTGCGCCAGCCACCAGGGCGTGGCATACTATAACTAC |
| | | GCCATGGACGTGTGGGGAAGAGGGACGCTCGTCACCGTGTCCTCCG |
| | | GGGGCGGTGGATCGGGTGGAGGAGGAAGCGGTGGCGGGGGCAGCG |
| | | AAATCGTGCTGACTCAGAGCCCGGGAACTCTTTCACTGTCCCCGGG |
| | | AGAACGGGCCACTCTCTCGTGCCGGGCCACCCAGTCCATCGGCTCC |
| | | TCCTTCCTTGCCTGGTACCAGCAGAGGCCAGGACAGGCGCCCCGCC |
| | | TGCTGATCTACGGTGCTTCCCAACGCGCCACTGGCATTCCTGACCGG |
| | | TTCAGCGGCAGAGGGTCGGGAACCGATTTCACACTGACCATTTCCC |
| | | GGGTGGAGCCCGAAGATTCGGCAGTCTACTACTGTCAGCATTACGA |
| | | GTCCTCCCCTTCATGGACCTTCGGTCAAGGGACCAAAGTGGAGATC |
| | | AAG |
| BCMA_EBB- | 184 | EVQLVESGGGLVQPGRSLRLSCTASGFTFDDYAMHWVRQRPGKGLE |
| C1979-C12- | | WVASINWKGNSLAYGDSVKGRFAISRDNAKNTVFLQMNSLRTEDTAV |
| aa | | YYCASHQGVAYYNYAMDVWGRGTLVTVSS |
| VH | | |
| BCMA_EBB- | 205 | EIVLTQSPGTLSLSPGERATLSCRATQSIGSSFLAWYQQRPGQAPRLLIY |
| C1979-C12- | | GASQRATGIPDRFSGRGSGTDFTLTISRVEPEDSAVYYCQHYESSPSWT |
| aa | | FGQGTKVEIK |
| VL | | |
| BCMA_EBB- | 226 | MALPVTALLLPLALLLHAARPEVQLVESGGGLVQPGRSLRLSCTASGF |
| C1979-C12- | | TFDDYAMHWVRQRPGKGLEWVASINWKGNSLAYGDSVKGRFAISRD |
| aa | | NAKNTVFLQMNSLRTEDTAVYYCASHQGVAYYNYAMDVWGRGTLV |
| Full CART | | TVSSGGGGSGGGGSGGGGSEIVLTQSPGTLSLSPGERATLSCRATQSIGS |
| | | SFLAWYQQRPGQAPRLLIYGASQRATGIPDRFSGRGSGTDFTLTISRVE |
| | | PEDSAVYYCQHYESSPSWTFGQGTKVEIKTTTPAPRPPTPAPTIASQPLS |
| | | LRPEACRPAAGGAVHTRGLDFACDIYIWAPLAGTCGVLLLSLVITLYC |
| | | KRGRKKLLYIFKQPFMRPVQTTQEEDGCSCRFPEEEEGGCELRVKFSRS |
| | | ADAPAYKQGQNQLYNELNLGRREEYDVLDKRRGRDPEMGGKPRRKN |
| | | PQEGLYNELQKDKMAEAYSEIGMKGERRRGKGHDGLYQGLSTATKD |
| | | TYDALHMQALPPR |
| BCMA_EBB- | 247 | ATGGCCCTCCCTGTCACCGCCCTGCTGCTTCCGCTGGCTCTTCTGCT |
| C1979-C12- | | CCACGCCGCTCGGCCCGAAGTGCAGCTCGTGGAGAGCGGGGGAGG |
| nt | | ATTGGTGCAGCCCGGAAGGTCCCTGCGGCTCTCCTGCACTGCGTCT |
| Full CART | | GGCTTCACCTTCGACGACTACGCGATGCACTGGGTCAGACAGCGCC |
| | | CGGGAAAGGGCCTGGAATGGGTCGCCTCAATCAACTGGAAGGGAA |
| | | ACTCCCTGGCCTATGGCGACAGCGTGAAGGGCCGCTTCGCCATTTC |
| | | GCGCGACAACGCCAAGAACACCGTGTTTCTGCAAATGAATTCCCTG |
| | | CGGACCGAGGATACCGCTGTGTACTACTGCGCCAGCCACCAGGGCG |
| | | TGGCATACTATAACTACGCCATGGACGTGTGGGGAAGAGGGACGCT |
| | | CGTCACCGTGTCCTCCGGGGGCGGTGGATCGGGTGGAGGAGGAAG |
| | | CGGTGGCGGGGGCAGCGAAATCGTGCTGACTCAGAGCCCGGGAAC |
| | | TCTTTCACTGTCCCCGGGAGAACGGGCCACTCTCTCGTGCCGGGCC |
| | | ACCCAGTCCATCGGCTCCTCCTTCCTTGCCTGGTACCAGCAGAGGCC |
| | | AGGACAGGCGCCCCGCCTGCTGATCTACGGTGCTTCCCAACGCGCC |
| | | ACTGGCATTCCTGACCGGTTCAGCGGCAGAGGGTCGGGAACCGATT |
| | | TCACACTGACCATTICCCGGGTGGAGCCCGAAGATTCGGCAGTCTA |
| | | CTACTGTCAGCATTACGAGTCCTCCCCTTCATGGACCTTCGGTCAAG |
| | | GGACCAAAGTGGAGATCAAGACCACTACCCCAGCACCGAGGCCAC |
| | | CCACCCCGGCTCCTACCATCGCCTCCCAGCCTCTGTCCCTGCGTCCG |
| | | GAGGCATGTAGACCCGCAGCTGGTGGGGCCGTGCATACCCGGGGTC |
| | | TTGACTTCGCCTGCGATATCTACATTTGGGCCCCTCTGGCTGGTACT |
| | | TGCGGGGTCCTGCTGCTTTCACTCGTGATCACTCTTTACTGTAAGCG |
| | | CGGTCGGAAGAAGCTGCTGTACATCTTTAAGCAACCCTTCATGAGG |
| | | CCTGTGCAGACTACTCAAGAGGAGGACGGCTGTTCATGCCGGTTCC |
| | | CAGAGGAGGAGGAAGGCGGCTGCGAACTGCGCGTGAAATTCAGCC |
| | | GCAGCGCAGATGCTCCAGCCTACAAGCAGGGGCAGAACCAGCTCT |
| | | ACAACGAACTCAATCTTGGTCGGAGAGAGGAGTACGACGTGCTGG |
| | | ACAAGCGGAGAGGACGGGACCCAGAAATGGGCGGGAAGCCGCGCA |
| | | GAAAGAATCCCCAAGAGGGCCTGTACAACGAGCTCCAAAAGGATA |
| | | AGATGGCAGAAGCCTATAGCGAGATTGGTATGAAAGGGGAACGCA |
| | | GAAGAGGCAAAGGCCACGACGGACTGTACCAGGGACTCAGCACCG |
| | | CCACCAAGGACACCTATGACGCTCTTCACATGCAGGCCCTGCCGCC |
| | | TCGG |

BCMA_EBB-C1980-G4

| | | |
|---|---|---|
| BCMA_EBB- | 143 | EVQLVESGGGLVQPGGSLRLSCAASGFTFSSYAMSWVRQAPGKGLEW |
| C1980-G4-aa | | VSAISGSGGSTYYADSVKGRFTISRDNSKNTLYLQMNSLRAEDTAVYY |
| ScFv domain | | CAKVVRDGMDVWGQGTTVTVSSGGGGSGGGGSGGGGSEIVLTQSPA |
| | | TLSLSPGERATLSCRASQSVSSSYLAWYQQKPGQAPRLLIYGASSRATG |
| | | IPDRFSGNGSGTDFTLTISRLEPEDFAVYYCQQYGSPPRFTFGPGTKVDI |
| | | K |
| BCMA_EBB- | 2018 | GAGGTGCAGTTGGTCGAAAGCGGGGGCGGGCTTGTGCAGCCTGGC |
| C1980-G4-nt | | GGATCACTGCGGCTGTCCTGCGCGGCATCAGGCTTCACGTTTTCTTC |
| ScFv domain | | CTACGCCATGTCCTGGGTGCGCCAGGCCCCTGGAAAGGGACTGGAA |
| | | TGGGTGTCCGCGATTTCGGGGTCCGGCGGGAGCACCTACTACGCCG |
| | | ATTCCGTGAAGGGCCGCTTCACTATCTCGCGGGACAACTCCAAGAA |
| | | CACCCTCTACCTCCAAATGAATAGCCTGCGGGCCGAGGATACCGCC |
| | | GTCTACTATTGCGCTAAGGTCGTGCGCGACGGAATGGACGTGTGGG |
| | | GACAGGGTACCACCGTGACAGTGTCCTCGGGGGGAGGCGGTAGCG |
| | | GCGGAGGAGGAAGCGGTGGTGGAGGTTCCGAGATTGTGCTGACTC |
| | | AATCACCCGCGACCCTGAGCCTGTCCCCCGGCGAAAGGGCCACTCT |
| | | GTCCTGTCGGGCCAGCCAATCAGTCTCCTCCTCGTACCTGGCCTGGT |
| | | ACCAGCAGAAGCCAGGACAGGCTCCGAGACTCCTTATCTATGGCGC |
| | | ATCCTCCCGCGCCACCGGAATCCCGGATAGGTTCTCGGGAAACGGA |
| | | TCGGGGACCGACTTCACTCTCACCATCTCCCGGCTGGAACCGGAGG |
| | | ACTTCGCCGTGTACTACTGCCAGCAGTACGGCAGCCCGCCTAGATT |
| | | CACTTTCGGCCCCGGCACCAAAGTGGACATCAAG |
| BCMA_EBB- | 185 | EVQLVESGGGLVQPGGSLRLSCAASGFTFSSYAMSWVRQAPGKGLEW |
| C1980-G4-aa | | VSAISGSGGSTYYADSVKGRFTISRDNSKNTLYLQMNSLRAEDTAVYY |
| VH | | CAKVVRDGMDVWGQGTTVTVSS |
| BCMA_EBB- | 206 | EIVLTQSPATLSLSPGERATLSCRASQSVSSSYLAWYQQKPGQAPRLLI |
| C1980-G4-aa | | YGASSRATGIPDRFSGNGSGTDFTLTISRLEPEDFAVYYCQQYGSPPRFT |
| VL | | FGPGTKVDIK |
| BCMA_EBB- | 227 | MALPVTALLLPLALLLHAARPEVQLVESGGGLVQPGGSLRLSCAASGF |
| C1980-G4-aa | | TFSSYAMSWVRQAPGKGLEWVSAISGSGGSTYYADSVKGRFTISRDNS |
| Full CART | | KNTLYLQMNSLRAEDTAVYYCAKVVRDGMDVWGQGTTVTVSSGGG |
| | | GSGGGGSGGGGSEIVLTQSPATLSLSPGERATLSCRASQSVSSSYLAWY |
| | | QQKPGQAPRLLIYGASSRATGIPDRFSGNGSGTDFTLTISRLEPEDFAVY |
| | | YCQQYGSPPRFTFGPGTKVDIKTTTPAPRPPTPAPTIASQPLSLRPEACRP |
| | | AAGGAVHTRGLDFACDIYIWAPLAGTCGVLLLSLVITLYCKRGRKKLL |
| | | YIFKQPFMRPVQTTQEEDGCSCRFPEEEEGGCELRVKFSRSADAPAYK |
| | | QGQNQLYNELNLGRREEYDVLDKRRGRDPEMGGKPRRKNPQEGLYN |
| | | ELQKDKMAEAYSEIGMKGERRRGKGHDGLYQGLSTATKDTYDALHM |
| | | QALPPR |
| BCMA_EBB- | 248 | ATGGCCCTCCCTGTCACCGCCCTGCTGCTTCCGCTGGCTCTTCTGCT |
| C1980-G4-nt | | CCACGCCGCTCGGCCCGAGGTGCAGTTGGTCGAAAGCGGGGGCGG |
| Full CART | | GCTTGTGCAGCCTGGCGGATCACTGCGGCTGTCCTGCGCGGCATCA |
| | | GGCTTCACGTTTTCTTCCTACGCCATGTCCTGGGTGCGCCAGGCCCC |
| | | TGGAAAGGGACTGGAATGGGTGTCCGCGATTTCGGGGTCCGGCGGG |
| | | AGCACCTACTACGCCGATTCCGTGAAGGGCCGCTTCACTATCTCGC |
| | | GGGACAACTCCAAGAACACCCTCTACCTCCAAATGAATAGCCTGCG |
| | | GGCCGAGGATACCGCCGTCTACTATTGCGCTAAGGTCGTGCGCGAC |
| | | GGAATGGACGTGTGGGGACAGGGTACCACCGTGACAGTGTCCTCGG |
| | | GGGGAGGCGGTAGCGGCGGAGGAGGAAGCGGTGGTGGAGGTTCCG |
| | | AGATTGTGCTGACTCAATCACCCGCGACCCTGAGCCTGTCCCCCGG |
| | | CGAAAGGGCCACTCTGTCCTGTCGGGCCAGCCAATCAGTCTCCTCC |
| | | TCGTACCTGGCCTGGTACCAGCAGAAGCCAGGACAGGCTCCGAGAC |
| | | TCCTTATCTATGGCGCATCCTCCCGCGCCACCGGAATCCCGGATAG |
| | | GTTCTCGGGAAACGGATCGGGGACCGACTTCACTCTCACCATCTCC |
| | | CGGCTGGAACCGGAGGACTTCGCCGTGTACTACTGCCAGCAGTACG |
| | | GCAGCCCGCCTAGATTCACTTTCGGCCCCGGCACCAAAGTGGACAT |
| | | CAAGACCACTACCCCAGCACCGAGGCCACCCACCCCGGCTCCTACC |
| | | ATCGCCTCCCAGCCTCTGTCCCTGCGTCCGGAGGCATGTAGACCCG |
| | | CAGCTGGTGGGGCCGTGCATACCCGGGGTCTTGACTTCGCCTGCGA |
| | | TATCTACATTTGGGCCCCTCTGGCTGGTACTTGCGGGGTCCTGCTGC |
| | | TTTCACTCGTGATCACTCTTTACTGTAAGCGCGGTCGGAAGAAGCTG |
| | | CTGTACATCTTTAAGCAACCCTTCATGAGGCCTGTGCAGACTACTCA |
| | | AGAGGAGGACGGCTGTTCATGCCGGTTCCCAGAGGAGGAGGAAGG |
| | | CGGCTGCGAACTGCGCGTGAAATTCAGCCGCAGCGCAGATGCTCCA |
| | | GCCTACAAGCAGGGGCAGAACCAGCTCTACAACGAACTCAATCTTG |
| | | GTCGGAGAGAGGAGTACGACGTGCTGGACAAGCGGAGAGGACGGG |
| | | ACCCAGAAATGGGCGGGAAGCCGCGCAGAAAGAATCCCCAAGAGG |
| | | GCCTGTACAACGAGCTCCAAAAGGATAAGATGGCAGAAGCCTATA |
| | | GCGAGATTGGTATGAAAGGGGAACGCAGAAGAGGCAAAGGCCACG |
| | | ACGGACTGTACCAGGGACTCAGCACCGCCACCAAGGACACCTATGA |
| | | CGCTCTTCACATGCAGGCCCTGCCGCCTCGG |

BCMA_EBB-C1980-D2

| | | |
|---|---|---|
| BCMA_EBB- | 144 | EVQLLESGGGLVQPGGSLRLSCAASGFTFSSYAMSWVRQAPGKGLEW |
| C1980-D2-aa | | VSAISGSGGSTYYADSVKGRFTISRDNSKNTLYLQMNSLRAEDTAVYY |
| ScFv domain | | CAKIPQTGTFDYWGQGTLVTVSSGGGGSGGGGSGGGGSEIVLTQSPGT |
| | | LSLSPGERATLSCRASQSVSSSYLAWYQQRPGQAPRLLIYGASSRATGI |
| | | PDRFSGSGSGTDFTLTISRLEPEDFAVYYCQHYGSSPSWTFGQGTRLEIK |
| BCMA_EBB- | 165 | GAAGTGCAGCTGCTGGAGTCCGGCGGTGGATTGGTGCAACCGGGG |
| C1980-D2-nt | | GGATCGCTCAGACTGTCCTGTGCGGCGTCAGGCTTCACCTTCTCGAG |
| ScFv domain | | CTACGCCATGTCATGGGTCAGACAGGCCCCTGGAAAGGGTCTGGAA |
| | | TGGGTGTCCGCCATTTCCGGGAGCGGGGGATCTACATACTACGCCG |
| | | ATAGCGTGAAGGGCCGCTTCACCATTTCCCGGGACAACTCCAAGAA |
| | | CACTCTCTATCTGCAAATGAACTCCCTCCGCGCTGAGGACACTGCC |
| | | GTGTACTACTGCGCCAAAATCCCTCAGACCGGCACCTTCGACTACT |
| | | GGGGACAGGGGACTCTGGTCACCGTCAGCAGCGGTGGCGGAGGTT |
| | | CGGGGGGAGGAGGAAGCGGCGGCGGAGGGTCCGAGATTGTGCTGA |
| | | CCCAGTCACCCGGCACTTTGTCCCTGTCGCCTGGAGAAAGGGCCAC |
| | | CCTTTCCTGCCGGGCATCCCAATCCGTGTCCTCCTCGTACCTGGCCT |
| | | GGTACCAGCAGAGGCCCGGACAGGCCCCACGGCTTCTGATCTACGG |
| | | AGCAAGCAGCCGCGCGACCGGTATCCCGGACCGGTTTTCGGGCTCG |
| | | GGCTCAGGAACTGACTTCACCCTCACCATCTCCCGCCTGGAACCCG |
| | | AAGATTTCGCTGTGTATTACTGCCAGCACTACGGCAGCTCCCCGTCC |
| | | TGGACGTTCGGCCAGGGAACTCGGCTGGAGATCAAG |
| BCMA_EBB- | 186 | EVQLLESGGGLVQPGGSLRLSCAASGFTFSSYAMSWVRQAPGKGLEW |
| C1980-D2-aa | | VSAISGSGGSTYYADSVKGRFTISRDNSKNTLYLQMNSLRAEDTAVYY |
| VH | | CAKIPQTGTFDYWGQGTLVTVSS |
| BCMA_EBB- | 207 | EIVLTQSPGTLSLSPGERATLSCRASQSVSSSYLAWYQQRPGQAPRLLIY |
| C1980-D2-aa | | GASSRATGIPDRFSGSGSGTDFTLTISRLEPEDFAVYYCQHYGSSPSWTF |
| VL | | GQGTRLEIK |
| BCMA_EBB- | 228 | MALPVTALLLPLALLLHAARPEVQLLESGGGLVQPGGSLRLSCAASGF |
| C1980-D2-aa | | TFSSYAMSWVRQAPGKGLEWVSAISGSGGSTYYADSVKGRFTISRDNS |
| Full CART | | KNTLYLQMNSLRAEDTAVYYCAKIPQTGTFDYWGQGTLVTVSSGGGG |
| | | SGGGGSGGGGSEIVLTQSPGTLSLSPGERATLSCRASQSVSSSYLAWYQ |
| | | QRPGQAPRLLIYGASSRATGIPDRFSGSGSGTDFTLTISRLEPEDFAVYY |
| | | CQHYGSSPSWTFGQGTRLEIKTTTPAPRPPTPAPTIASQPLSLRPEACRP |
| | | AAGGAVHTRGLDFACDIYIWAPLAGTCGVLLLSLVITLYCKRGRKKLL |
| | | YIFKQPFMRPVQTTQEEDGCSCRFPEEEEGGCELRVKFSRSADAPAYK |
| | | QGQNQLYNELNLGRREEYDVLDKRRGRDPEMGGKPRRKNPQEGLYN |
| | | ELQKDKMAEAYSEIGMKGERRRGKGHDGLYQGLSTATKDTYDALHM |
| | | QALPPR |
| BCMA_EBB- | 249 | ATGGCCCTCCCTGTCACCGCCCTGCTGCTTCCGCTGGCTCTTCTGCT |
| C1980-D2-nt | | CCACGCCGCTCGGCCCGAAGTGCAGCTGCTGGAGTCCGGCGGTGGA |
| Full CART | | TTGGTGCAACCGGGGGGATCGCTCAGACTGTCCTGTGCGGCGTCAG |
| | | GCTTCACCTTCTCGAGCTACGCCATGTCATGGGTCAGACAGGCCCCT |
| | | GGAAAGGGTCTGGAATGGGTGTCCGCCATTTCCGGGAGCGGGGGAT |
| | | CTACATACTACGCCGATAGCGTGAAGGGCCGCTTCACCATTTCCCG |
| | | GGACAACTCCAAGAACACTCTCTATCTGCAAATGAACTCCCTCCGC |
| | | GCTGAGGACACTGCCGTGTACTACTGCGCCAAAATCCCTCAGACCG |
| | | GCACCTTCGACTACTGGGGACAGGGGACTCTGGTCACCGTCAGCAG |
| | | CGGTGGCGGAGGTTCGGGGGGAGGAGGAAGCGGCGGCGGAGGGTC |
| | | CGAGATTGTGCTGACCCAGTCACCCGGCACTTTGTCCCTGTCGCCTG |
| | | GAGAAAGGGCCACCCTTTCCTGCCGGGCATCCCAATCCGTGTCCTC |
| | | CTCGTACCTGGCCTGGTACCAGCAGAGGCCCGGACAGGCCCCACGG |
| | | CTTCTGATCTACGGAGCAAGCAGCCGCGCGACCGGTATCCCGGACC |
| | | GGTTTTCGGGCTCGGGCTCAGGAACTGACTTCACCCTCACCATCTCC |
| | | CGCCTGGAACCCGAAGATTTCGCTGTGTATTACTGCCAGCACTACG |
| | | GCAGCTCCCCGTCCTGGACGTTCGGCCAGGGAACTCGGCTGGAGAT |
| | | CAAGACCACTACCCCAGCACCGAGGCCACCCACCCCGGCTCCTACC |
| | | ATCGCCTCCCAGCCTCTGTCCCTGCGTCCGGAGGCATGTAGACCCG |
| | | CAGCTGGTGGGGCCGTGCATACCCGGGGTCTTGACTTCGCCTGCGA |
| | | TATCTACATTTGGGCCCCTCTGGCTGGTACTTGCGGGGTCCTGCTGC |
| | | TTTCACTCGTGATCACTCTTTACTGTAAGCGCGGTCGGAAGAAGCTG |
| | | CTGTACATCTTTAAGCAACCCTTCATGAGGCCTGTGCAGACTACTCA |
| | | AGAGGAGGACGGCTGTTCATGCCGGTTCCCAGAGGAGGAGGAAGG |
| | | CGGCTGCGAACTGCGCGTGAAATTCAGCCGCAGCGCAGATGCTCCA |
| | | GCCTACAAGCAGGGGCAGAACCAGCTCTACAACGAACTCAATCTTG |
| | | GTCGGAGAGAGGAGTACGACGTGCTGGACAAGCGGAGAGGACGGG |
| | | ACCCAGAAATGGGCGGGAAGCCGCGCAGAAAGAATCCCCAAGAGG |
| | | GCCTGTACAACGAGCTCCAAAAGGATAAGATGGCAGAAGCCTATA |
| | | GCGAGATTGGTATGAAAGGGGAACGCAGAAGAGGCAAAGGCCACG |
| | | ACGGACTGTACCAGGGACTCAGCACCGCCACCAAGGACACCTATGA |
| | | CGCTCTTCACATGCAGGCCCTGCCGCCTCGG |

BCMA_EBB-C1978-A10

| | | |
|---|---|---|
| BCMA_EBB- | 145 | EVQLVETGGGLVQPGGSLRLSCAASGFTFSSYAMSWVRQAPGKGLEW |
| C1978-A10- | | VSAISGSGGSTYYADSVKGRFTMSRENDKNSVFLQMNSLRVEDTGVY |
| aa | | YCARANYKRELRYYYGMDVWGQGTMVTVSSGGGGSGGGGSGGGGS |
| ScFv domain | | EIVMTQSPGTLSLSPGESATLSCRASQRVASNYLAWYQHKPGQAPSLLI |
| | | SGASSRATGVPDRFSGSGSGTDFTLAISRLEPEDSAVYYCQHYDSSPSW |
| | | TFGQGTKVEIK |
| BCMA_EBB- | 166 | GAAGTGCAACTGGTGGAAACCGGTGGAGGACTCGTGCAGCCTGGC |
| C1978-A10- | | GGCAGCCTCCGGCTGAGCTGCGCCGCTTCGGGATTCACCTTTTCCTC |
| nt | | CTACGCGATGTCTTGGGTCAGACAGGCCCCCGGAAAGGGGCTGGAA |
| ScFv domain | | TGGGTGTCAGCCATCTCCGGCTCCGGCGGATCAACGTACTACGCCG |
| | | ACTCCGTGAAAGGCCGGTTCACCATGTCGCGCGAGAATGACAAGAA |
| | | CTCCGTGTTCCTGCAAATGAACTCCCTGAGGGTGGAGGACACCGGA |
| | | GTGTACTATTGTGCGCGCGCCAACTACAAGAGAGAGCTGCGGTACT |
| | | ACTACGGAATGGACGTCTGGGGACAGGGAACTATGGTGACCGTGTC |
| | | ATCCGGTGGAGGGGGAAGCGGCGGTGGAGGCAGCGGGGGCGGGGG |
| | | TTCAGAAATTGTCATGACCCAGTCCCCGGGAACTCTTTCCCTCTCCC |
| | | CCGGGGAATCCGCGACTTTGTCCTGCCGGGCCAGCCAGCGCGTGGC |
| | | CTCGAACTACCTCGCATGGTACCAGCATAAGCCAGGCCAAGCCCCT |
| | | TCCCTGCTGATTTCCGGGGCTAGCAGCCGCGCCACTGGCGTGCCGG |
| | | ATAGGTTCTCGGGAAGCGGCTCGGGTACCGATTTCACCCTGGCAAT |
| | | CTCGCGGCTGGAACCGGAGGATTCGGCCGTGTACTACTGCCAGCAC |
| | | TATGACTCATCCCCCTCCTGGACATTCGGACAGGGCACCAAGGTCG |
| | | AGATCAAG |
| BCMA_EBB- | 187 | EVQLVETGGGLVQPGGSLRLSCAASGFTFSSYAMSWVRQAPGKGLEW |
| C1978-A10- | | VSAISGSGGSTYYADSVKGRFTMSRENDKNSVFLQMNSLRVEDTGVY |
| aa | | YCARANYKRELRYYYGMDVWGQGTMVTVSS |
| VH | | |
| BCMA_EBB- | 208 | EIVMTQSPGTLSLSPGESATLSCRASQRVASNYLAWYQHKPGQAPSLLI |
| C1978-A10- | | SGASSRATGVPDRFSGSGSGTDFTLAISRLEPEDSAVYYCQHYDSSPSW |
| aa | | TFGQGTKVEIK |
| VL | | |
| BCMA_EBB- | 229 | MALPVTALLLPLALLLHAARPEVQLVETGGGLVQPGGSLRLSCAASGF |
| C1978-A10- | | TFSSYAMSWVRQAPGKGLEWVSAISGSGGSTYYADSVKGRFTMSREN |
| aa | | DKNSVFLQMNSLRVEDTGVYYCARANYKRELRYYYGMDVWGQGTM |
| Full CART | | VTVSSGGGGSGGGGSGGGGSEIVMTQSPGTLSLSPGESATLSCRASQR |
| | | VASNYLAWYQHKPGQAPSLLISGASSRATGVPDRFSGSGSGTDFTLAIS |
| | | RLEPEDSAVYYCQHYDSSPSWTFGQGTKVEIKTTTPAPRPPTPAPTIAS |
| | | QPLSLRPEACRPAAGGAVHTRGLDFACDIYIWAPLAGTCGVLLLSLVIT |
| | | LYCKRGRKKLLYIFKQPFMRPVQTTQEEDGCSCRFPEEEEGGCELRVK |
| | | FSRSADAPAYKQGQNQLYNELNLGRREEYDVLDKRRGRDPEMGGKP |
| | | RRKNPQEGLYNELQKDKMAEAYSEIGMKGERRRGKGHDGLYQGLST |
| | | ATKDTYDALHMQALPPR |
| BCMA_EBB- | 250 | ATGGCCCTCCCTGTCACCGCCCTGCTGCTTCCGCTGGCTCTTCTGCT |
| C1978-A10- | | CCACGCCGCTCGGCCCGAAGTGCAACTGGTGGAAACCGGTGGAGG |
| nt | | ACTCGTGCAGCCTGGCGGCAGCCTCCGGCTGAGCTGCGCCGCTTCG |
| Full CART | | GGATTCACCTTTTCCTCCTACGCGATGTCTTGGGTCAGACAGGCCCC |
| | | CGGAAAGGGGCTGGAATGGGTGTCAGCCATCTCCGGCTCCGGCGGA |
| | | TCAACGTACTACGCCGACTCCGTGAAAGGCCGGTTCACCATGTCGC |
| | | GCGAGAATGACAAGAACTCCGTGTTCCTGCAAATGAACTCCCTGAG |
| | | GGTGGAGGACACCGGAGTGTACTATTGTGCGCGCGCCAACTACAAG |
| | | AGAGAGCTGCGGTACTACTACGGAATGGACGTCTGGGGACAGGGA |
| | | ACTATGGTGACCGTGTCATCCGGTGGAGGGGGAAGCGGCGGTGGA |
| | | GGCAGCGGGGGCGGGGGTTCAGAAATTGTCATGACCCAGTCCCCGG |
| | | GAACTCTTTCCCTCTCCCCCGGGGAATCCGCGACTTTGTCCTGCCGG |
| | | GCCAGCCAGCGCGTGGCCTCGAACTACCTCGCATGGTACCAGCATA |
| | | AGCCAGGCCAAGCCCCTTCCCTGCTGATTTCCGGGGCTAGCAGCCG |
| | | CGCCACTGGCGTGCCGGATAGGTTCTCGGGAAGCGGCTCGGGTACC |
| | | GATTTCACCCTGGCAATCTCGCGGCTGGAACCGGAGGATTCGGCCG |
| | | TGTACTACTGCCAGCACTATGACTCATCCCCCTCCTGGACATTCGGA |
| | | CAGGGCACCAAGGTCGAGATCAAGACCACTACCCCAGCACCGAGG |
| | | CCACCCACCCCGGCTCCTACCATCGCCTCCCAGCCTCTGTCCCTGCG |
| | | TCCGGAGGCATGTAGACCCGCAGCTGGTGGGGCCGTGCATACCCGG |
| | | GGTCTTGACTTCGCCTGCGATATCTACATTTGGGCCCCTCTGGCTGG |
| | | TACTTGCGGGGTCCTGCTGCTTTCACTCGTGATCACTCTTTACTGTA |
| | | AGCGCGGTCGGAAGAAGCTGCTGTACATCTTTAAGCAACCCTTCAT |
| | | GAGGCCTGTGCAGACTACTCAAGAGGAGGACGGCTGTTCATGCCGG |
| | | TTCCCAGAGGAGGAGGAAGGCGGCTGCGAACTGCGCGTGAAATTC |
| | | AGCCGCAGCGCAGATGCTCCAGCCTACAAGCAGGGGCAGAACCAG |
| | | CTCTACAACGAACTCAATCTTGGTCGGAGAGAGGAGTACGACGTGC |
| | | TGGACAAGCGGAGAGGACGGGACCCAGAAATGGGCGGGAAGCCGC |
| | | GCAGAAAGAATCCCCAAGAGGGCCTGTACAACGAGCTCCAAAAGG |
| | | ATAAGATGGCAGAAGCCTATAGCGAGATTGGTATGAAAGGGGAAC |
| | | GCAGAAGAGGCAAAGGCCACGACGGACTGTACCAGGGACTCAGCA |
| | | CCGCCACCAAGGACACCTATGACGCTCTTCACATGCAGGCCCTGCC |
| | | GCCTCGG |

BCMA_EBB-C1978-D4

| | | |
|---|---|---|
| BCMA_EBB- | 146 | EVQLLETGGGLVQPGGSLRLSCAASGFSFSSYAMSWVRQAPGKGLEW |
| C1978-D4-aa | | VSAISGSGGSTYYADSVKGRFTISRDNSKNTLYLQMNSLRAEDTAVYY |
| ScFv domain | | CAKALVGATGAFDIWGQGTLVTVSSGGGGSGGGGSGGGGSEIVLTQS |
| | | PGTLSLSPGERATLSCRASQSLSSNFLAWYQQKPGQAPGLLIYGASNW |
| | | ATGTPDRFSGSGSGTDFTLTITRLEPEDFAVYYCQYYGTSPMYTFGQGT |
| | | KVEIK |
| BCMA_EBB- | 167 | GAAGTGCAGCTGCTCGAAACCGGTGGAGGGCTGGTGCAGCCAGGG |
| C1978-D4-nt | | GGCTCCCTGAGGCTTTCATGCGCCGCTAGCGGATTCTCCTTCTCCTC |
| ScFv domain | | TTACGCCATGTCGTGGGTCCGCCAAGCCCCTGGAAAAGGCCTGGAA |
| | | TGGGTGTCCGCGATTTCCGGGAGCGGAGGTTCGACCTATTACGCCG |
| | | ACTCCGTGAAGGGCCGCTTTACCATCTCCCGGGATAACTCCAAGAA |
| | | CACTCTGTACCTCCAAATGAACTCGCTGAGAGCCGAGGACACCGCC |
| | | GTGTATTACTGCGCGAAGGCGCTGGTCGGCGCGACTGGGGCATTCG |
| | | ACATCTGGGGACAGGGAACTCTTGTGACCGTGTCGAGCGGAGGCGG |
| | | CGGCTCCGGCGGAGGAGGGAGCGGGGGCGGTGGTTCCGAAATCGT |
| | | GTTGACTCAGTCCCCGGGAACCCTGAGCTTGTCACCCGGGGAGCGG |
| | | GCCACTCTCTCCTGTCGCGCCTCCCAATCGCTCTCATCCAATTTCCT |
| | | GGCCTGGTACCAGCAGAAGCCCGGACAGGCCCCGGGCCTGCTCATC |
| | | TACGGCGCTTCAAACTGGGCAACGGGAACCCCTGATCGGTTCAGCG |
| | | GAAGCGGATCGGGTACTGACTTTACCCTGACCATCACCAGACTGGA |
| | | ACCGGAGGACTTCGCCGTGTACTACTGCCAGTACTACGGCACCTCC |
| | | CCCATGTACACATTCGGACAGGGTACCAAGGTCGAGATTAAG |
| BCMA_EBB- | 188 | EVQLLETGGGLVQPGGSLRLSCAASGFSFSSYAMSWVRQAPGKGLEW |
| C1978-D4-aa | | VSAISGSGGSTYYADSVKGRFTISRDNSKNTLYLQMNSLRAEDTAVYY |
| VH | | CAKALVGATGAFDIWGQGTLVTVSS |
| BCMA_EBB- | 209 | EIVLTQSPGTLSLSPGERATLSCRASQSLSSNFLAWYQQKPGQAPGLLIY |
| C1978-D4-aa | | GASNWATGTPDRFSGSGSGTDFTLTITRLEPEDFAVYYCQYYGTSPMY |
| VL | | TFGQGTKVEIK |
| BCMA_EBB- | 230 | MALPVTALLLPLALLLHAARPEVQLLETGGGLVQPGGSLRLSCAASGF |
| C1978-D4-aa | | SFSSYAMSWVRQAPGKGLEWVSAISGSGGSTYYADSVKGRFTISRDNS |
| Full CART | | KNTLYLQMNSLRAEDTAVYYCAKALVGATGAFDIWGQGTLVTVSSG |
| | | GGGSGGGGSGGGGSEIVLTQSPGTLSLSPGERATLSCRASQSLSSNFLA |
| | | WYQQKPGQAPGLLIYGASNWATGTPDRFSGSGSGTDFTLTITRLEPEDF |
| | | AVYYCQYYGTSPMYTFGQGTKVEIKTTTPAPRPPTPAPTIASQPLSLRP |
| | | EACRPAAGGAVHTRGLDFACDIYIWAPLAGTCGVLLLSLVITLYCKRG |
| | | RKKLLYIFKQPFMRPVQTTQEEDGCSCRFPEEEEGGCELRVKFSRSADA |
| | | PAYKQGQNQLYNELNLGRREEYDVLDKRRGRDPEMGGKPRRKNPQE |
| | | GLYNELQKDKMAEAYSEIGMKGERRRGKGHDGLYQGLSTATKDTYD |
| | | ALHMQALPPR |
| BCMA_EBB- | 251 | ATGGCCCTCCCTGTCACCGCCCTGCTGCTTCCGCTGGCTCTTCTGCT |
| C1978-D4-nt | | CCACGCCGCTCGGCCCGAAGTGCAGCTGCTCGAAACCGGTGGAGGG |
| Full CART | | CTGGTGCAGCCAGGGGGCTCCCTGAGGCTTTCATGCGCCGCTAGCG |
| | | GATTCTCCTTCTCCTCTTACGCCATGTCGTGGGTCCGCCAAGCCCCT |
| | | GGAAAAGGCCTGGAATGGGTGTCCGCGATTTCCGGGAGCGGAGGTT |
| | | CGACCTATTACGCCGACTCCGTGAAGGGCCGCTTTACCATCTCCCG |
| | | GGATAACTCCAAGAACACTCTGTACCTCCAAATGAACTCGCTGAGA |
| | | GCCGAGGACACCGCCGTGTATTACTGCGCGAAGGCGCTGGTCGGCG |
| | | CGACTGGGGCATTCGACATCTGGGGACAGGGAACTCTTGTGACCGT |
| | | GTCGAGCGGAGGCGGCGGCTCCGGCGGAGGAGGGAGCGGGGGCGG |
| | | TGGTTCCGAAATCGTGTTGACTCAGTCCCCGGGAACCCTGAGCTTGT |
| | | CACCCGGGGAGCGGGCCACTCTCTCCTGTCGCGCCTCCCAATCGCT |
| | | CTCATCCAATTTCCTGGCCTGGTACCAGCAGAAGCCCGGACAGGCC |
| | | CCGGGCCTGCTCATCTACGGCGCTTCAAACTGGGCAACGGGAACCC |
| | | CTGATCGGTTCAGCGGAAGCGGATCGGGTACTGACTTTACCCTGAC |
| | | CATCACCAGACTGGAACCGGAGGACTTCGCCGTGTACTACTGCCAG |
| | | TACTACGGCACCTCCCCCATGTACACATTCGGACAGGGTACCAAGG |
| | | TCGAGATTAAGACCACTACCCCAGCACCGAGGCCACCCACCCCGGC |
| | | TCCTACCATCGCCTCCCAGCCTCTGTCCCTGCGTCCGGAGGCATGTA |
| | | GACCCGCAGCTGGTGGGGCCGTGCATACCCGGGGTCTTGACTTCGC |
| | | CTGCGATATCTACATTTGGGCCCCTCTGGCTGGTACTTGCGGGGTCC |
| | | TGCTGCTTTCACTCGTGATCACTCTTTACTGTAAGCGCGGTCGGAAG |
| | | AAGCTGCTGTACATCTTTAAGCAACCCTTCATGAGGCCTGTGCAGA |
| | | CTACTCAAGAGGAGGACGGCTGTTCATGCCGGTTCCCAGAGGAGGA |
| | | GGAAGGCGGCTGCGAACTGCGCGTGAAATTCAGCCGCAGCGCAGA |
| | | TGCTCCAGCCTACAAGCAGGGGCAGAACCAGCTCTACAACGAACTC |
| | | AATCTTGGTCGGAGAGAGGAGTACGACGTGCTGGACAAGCGGAGA |
| | | GGACGGGACCCAGAAATGGGCGGGAAGCCGCGCAGAAAGAATCCC |
| | | CAAGAGGGCCTGTACAACGAGCTCCAAAAGGATAAGATGGCAGAA |
| | | GCCTATAGCGAGATTGGTATGAAAGGGGAACGCAGAAGAGGCAAA |
| | | GGCCACGACGGACTGTACCAGGGACTCAGCACCGCCACCAAGGAC |
| | | ACCTATGACGCTCTTCACATGCAGGCCCTGCCGCCTCGG |

BCMA_EBB-C1980-A2

| | | |
|---|---|---|
| BCMA_EBB- | 147 | EVQLLESGGGLVQPGGSLRLSCAASGFTFSSYAMSWVRQAPGKGLEW |
| C1980-A2-aa | | VSAISGSGGSTYYADSVKGRFTISRDNSKNTLYLQMNSLRAEDTAVYY |
| ScFv domain | | CVLWFGEGFDPWGQGTLVTVSSGGGGSGGGGSGGGGSDIVLTQSPLS |
| | | LPVTPGEPASISCRSSQSLLHSNGYNYLDWYLQKPGQSPQLLIYLGSNR |
| | | ASGVPDRFSGSGSGTDFTLKISRVEAEDVGVYYCMQALQTPLTFGGGT |
| | | KVDIK |
| BCMA_EBB- | 168 | GAAGTGCAGCTGCTTGAGAGCGGTGGAGGTCTGGTGCAGCCCGGG |
| C1980-A2-nt | | GGATCACTGCGCCTGTCCTGTGCCGCGTCCGGTTTCACTTTCTCCTC |
| ScFv domain | | GTACGCCATGTCGTGGGTCAGACAGGCACCGGGAAAGGGACTGGA |
| | | ATGGGTGTCAGCCATTTCGGGTTCGGGGGGCAGCACCTACTACGCT |
| | | GACTCCGTGAAGGGCCGGTTCACCATTTCCCGCGACAACTCCAAGA |
| | | ACACCTTGTACCTCCAAATGAACTCCCTGCGGGCCGAAGATACCGC |
| | | CGTGTATTACTGCGTGCTGTGGTTCGGAGAGGGATTCGACCCGTGG |
| | | GGACAAGGAACACTCGTGACTGTGTCATCCGGCGGAGGCGGCAGC |
| | | GGTGGCGGCGGTTCCGGCGGCGGCGGATCTGACATCGTGTTGACCC |
| | | AGTCCCCTCTGAGCCTGCCGGTCACTCCTGGCGAACCAGCCAGCAT |
| | | CTCCTGCCGGTCGAGCCAGTCCCTCCTGCACTCCAATGGGTACAACT |
| | | ACCTCGATTGGTATCTGCAAAAGCCGGGCCAGAGCCCCCAGCTGCT |
| | | GATCTACCTTGGGTCAAACCGCGCTTCCGGGGTGCCTGATAGATTCT |
| | | CCGGGTCCGGGAGCGGAACCGACTTTACCCTGAAAATCTCGAGGGT |
| | | GGAGGCCGAGGACGTCGGAGTGTACTACTGCATGCAGGCGCTCCAG |
| | | ACTCCCCTGACCTTCGGAGGAGGAACGAAGGTCGACATCAAGA |
| BCMA_EBB- | 189 | EVQLLESGGGLVQPGGSLRLSCAASGFTFSSYAMSWVRQAPGKGLEW |
| C1980-A2-aa | | VSAISGSGGSTYYADSVKGRFTISRDNSKNTLYLQMNSLRAEDTAVYY |
| VH | | CVLWFGEGFDPWGQGTLVTVSS |
| BCMA_EBB- | 210 | DIVLTQSPLSLPVTPGEPASISCRSSQSLLHSNGYNYLDWYLQKPGQSP |
| C1980-A2-aa | | QLLIYLGSNRASGVPDRFSGSGSGTDFTLKISRVEAEDVGVYYCMQAL |
| VL | | QTPLTFGGGTKVDIK |
| BCMA_EBB- | 231 | MALPVTALLLPLALLLHAARPEVQLLESGGGLVQPGGSLRLSCAASGF |
| C1980-A2-aa | | TFSSYAMSWVRQAPGKGLEWVSAISGSGGSTYYADSVKGRFTISRDNS |
| Full CART | | KNTLYLQMNSLRAEDTAVYYCVLWFGEGFDPWGQGTLVTVSSGGGG |
| | | SGGGGSGGGGSDIVLTQSPLSLPVTPGEPASISCRSSQSLLHSNGYNYLD |
| | | WYLQKPGQSPQLLIYLGSNRASGVPDRFSGSGSGTDFTLKISRVEAEDV |
| | | GVYYCMQALQTPLTFGGGTKVDIKTTTPAPRPPTPAPTIASQPLSLRPE |
| | | ACRPAAGGAVHTRGLDFACDIYIWAPLAGTCGVLLLSLVITLYCKRGR |
| | | KKLLYIFKQPFMRPVQTTQEEDGCSCRFPEEEEGGCELRVKFSRSADAP |
| | | AYKQGQNQLYNELNLGRREEYDVLDKRRGRDPEMGGKPRRKNPQEG |
| | | LYNELQKDKMAEAYSEIGMKGERRRGKGHDGLYQGLSTATKDTYDA |
| | | LHMQALPPR |
| BCMA_EBB- | 252 | ATGGCCCTCCCTGTCACCGCCCTGCTGCTTCCGCTGGCTCTTCTGCT |
| C1980-A2-nt | | CCACGCCGCTCGGCCCGAAGTGCAGCTGCTTGAGAGCGGTGGAGGT |
| Full CART | | CTGGTGCAGCCCGGGGGATCACTGCGCCTGTCCTGTGCCGCGTCCG |
| | | GTTTCACTTTCTCCTCGTACGCCATGTCGTGGGTCAGACAGGCACCG |
| | | GGAAAGGGACTGGAATGGGTGTCAGCCATTTCGGGTTCGGGGGGC |
| | | AGCACCTACTACGCTGACTCCGTGAAGGGCCGGTTCACCATTTCCC |
| | | GCGACAACTCCAAGAACACCTTGTACCTCCAAATGAACTCCCTGCG |
| | | GGCCGAAGATACCGCCGTGTATTACTGCGTGCTGTGGTTCGGAGAG |
| | | GGATTCGACCCGTGGGGACAAGGAACACTCGTGACTGTGTCATCCG |
| | | GCGGAGGCGGCAGCGGTGGCGGCGGTTCCGGCGGCGGCGGATCTG |
| | | ACATCGTGTTGACCCAGTCCCCTCTGAGCCTGCCGGTCACTCCTGGC |
| | | GAACCAGCCAGCATCTCCTGCCGGTCGAGCCAGTCCCTCCTGCACT |
| | | CCAATGGGTACAACTACCTCGATTGGTATCTGCAAAAGCCGGGCCA |
| | | GAGCCCCCAGCTGCTGATCTACCTTGGGTCAAACCGCGCTTCCGGG |
| | | GTGCCTGATAGATTCTCCGGGTCCGGGAGCGGAACCGACTTTACCC |
| | | TGAAAATCTCGAGGGTGGAGGCCGAGGACGTCGGAGTGTACTACTG |
| | | CATGCAGGCGCTCCAGACTCCCCTGACCTTCGGAGGAGGAACGAAG |
| | | GTCGACATCAAGACCACTACCCCAGCACCGAGGCCACCCACCCCGG |
| | | CTCCTACCATCGCCTCCCAGCCTCTGTCCCTGCGTCCGGAGGCATGT |
| | | AGACCCGCAGCTGGTGGGGCCGTGCATACCCGGGGTCTTGACTTCG |
| | | CCTGCGATATCTACATTTGGGCCCCTCTGGCTGGTACTTGCGGGGTC |
| | | CTGCTGCTTTCACTCGTGATCACTCTTTACTGTAAGCGCGGTCGGAA |
| | | GAAGCTGCTGTACATCTTTAAGCAACCCTTCATGAGGCCTGTGCAG |
| | | ACTACTCAAGAGGAGGACGGCTGTTCATGCCGGTTCCCAGAGGAGG |
| | | AGGAAGGCGGCTGCGAACTGCGCGTGAAATTCAGCCGCAGCGCAG |
| | | ATGCTCCAGCCTACAAGCAGGGGCAGAACCAGCTCTACAACGAACT |
| | | CAATCTTGGTCGGAGAGAGGAGTACGACGTGCTGGACAAGCGGAG |
| | | AGGACGGGACCCAGAAATGGGCGGGAAGCCGCGCAGAAAGAATCC |
| | | CCAAGAGGGCCTGTACAACGAGCTCCAAAAGGATAAGATGGCAGA |
| | | AGCCTATAGCGAGATTGGTATGAAAGGGGAACGCAGAAGAGGCAA |
| | | AGGCCACGACGGACTGTACCAGGGACTCAGCACCGCCACCAAGGA |
| | | CACCTATGACGCTCTTCACATGCAGGCCCTGCCGCCTCGG |

BCMA_EBB-C1981-C3

| | | |
|---|---|---|
| BCMA_EBB- | 148 | QVQLVESGGGLVQPGGSLRLSCAASGFTFSSYAMSWVRQAPGKGLEW |
| C1981-C3-aa | | VSAISGSGGSTYYADSVKGRFTISRDNSKNTLYLQMNSLRAEDTAVYY |
| ScFv domain | | CAKVGYDSSGYYRDYYGMDVWGQGTTVTVSSGGGGSGGGGSGGGG |
| | | SEIVLTQSPGTLSLSPGERATLSCRASQSVSSSYLAWYQQKPGQAPRLLI |
| | | YGTSSRATGISDRFSGSGSGTDFTLTISRLEPEDFAVYYCQHYGNSPPKF |
| | | TFGPGTKLEIK |
| BCMA_EBB- | 169 | CAAGTGCAGCTCGTGGAGTCAGGCGGAGGACTGGTGCAGCCCGGG |
| C1981-C3-nt | | GGCTCCCTGAGACTTTCCTGCGCGGCATCGGGTTTTACCTTCTCCTC |
| ScFv domain | | CTATGCTATGTCCTGGGTGCGCCAGGCCCCGGGAAAGGGACTGGAA |
| | | TGGGTGTCCGCAATCAGCGGTAGCGGGGGCTCAACATACTACGCCG |
| | | ACTCCGTCAAGGGTCGCTTCACTATTTCCCGGGACAACTCCAAGAA |
| | | TACCCTGTACCTCCAAATGAACAGCCTCAGGGCCGAGGATACTGCC |
| | | GTGTACTACTGCGCCAAAGTCGGATACGATAGCTCCGGTTACTACC |
| | | GGGACTACTACGGAATGGACGTGTGGGGACAGGGCACCACCGTGA |
| | | CCGTGTCAAGCGGCGGAGGCGGTTCAGGAGGGGGAGGCTCCGGCG |
| | | GTGGAGGGTCCGAAATCGTCCTGACTCAGTCGCCTGGCACTCTGTC |
| | | GTTGTCCCCGGGGGAGCGCGCTACCCTGTCGTGTCGGGCGTCGCAG |
| | | TCCGTGTCGAGCTCCTACCTCGCGTGGTACCAGCAGAAGCCCGGAC |
| | | AGGCCCCTAGACTTCTGATCTACGGCACTTCTTCACGCGCCACCGG |
| | | GATCAGCGACAGGTTCAGCGGCTCCGGCTCCGGGACCGACTTCACC |
| | | CTGACCATTAGCCGGCTGGAGCCTGAAGATTTCGCCGTGTATTACT |
| | | GCCAACACTACGGAAACTCGCCGCCAAAGTTCACGTTCGGACCCGG |
| | | AACCAAGCTGGAAATCAAG |
| BCMA_EBB- | 190 | QVQLVESGGGLVQPGGSLRLSCAASGFTFSSYAMSWVRQAPGKGLEW |
| C1981-C3-aa | | VSAISGSGGSTYYADSVKGRFTISRDNSKNTLYLQMNSLRAEDTAVYY |
| VH | | CAKVGYDSSGYYRDYYGMDVWGQGTTVTVSS |
| BCMA_EBB- | 211 | EIVLTQSPGTLSLSPGERATLSCRASQSVSSSYLAWYQQKPGQAPRLLI |
| C1981-C3-aa | | YGTSSRATGISDRFSGSGSGTDFTLTISRLEPEDFAVYYCQHYGNSPPKF |
| VL | | TFGPGTKLEIK |
| BCMA_EBB- | 232 | MALPVTALLLPLALLLHAARPQVQLVESGGGLVQPGGSLRLSCAASGF |
| C1981-C3-aa | | TFSSYAMSWVRQAPGKGLEWVSAISGSGGSTYYADSVKGRFTISRDNS |
| Full CART | | KNTLYLQMNSLRAEDTAVYYCAKVGYDSSGYYRDYYGMDVWGQGT |
| | | TVTVSSGGGGSGGGGSGGGGSEIVLTQSPGTLSLSPGERATLSCRASQS |
| | | VSSSYLAWYQQKPGQAPRLLIYGTSSRATGISDRFSGSGSGTDFTLTISR |
| | | LEPEDFAVYYCQHYGNSPPKFTFGPGTKLEIKTTTPAPRPPTPAPTIASQ |
| | | PLSLRPEACRPAAGGAVHTRGLDFACDIYIWAPLAGTCGVLLLSLVITL |
| | | YCKRGRKKLLYIFKQPFMRPVQTTQEEDGCSCRFPEEEEGGCELRVKF |
| | | SRSADAPAYKQGQNQLYNELNLGRREEYDVLDKRRGRDPEMGGKPR |
| | | RKNPQEGLYNELQKDKMAEAYSEIGMKGERRRGKGHDGLYQGLSTA |
| | | TKDTYDALHMQALPPR |
| BCMA_EBB- | 253 | ATGGCCCTCCCTGTCACCGCCCTGCTGCTTCCGCTGGCTCTTCTGCT |
| C1981-C3-nt | | CCACGCCGCTCGGCCCCAAGTGCAGCTCGTGGAGTCAGGCGGAGGA |
| Full CART | | CTGGTGCAGCCCGGGGGCTCCCTGAGACTTTCCTGCGCGGCATCGG |
| | | GTTTTACCTTCTCCTCCTATGCTATGTCCTGGGTGCGCCAGGCCCCG |
| | | GGAAAGGGACTGGAATGGGTGTCCGCAATCAGCGGTAGCGGGGGC |
| | | TCAACATACTACGCCGACTCCGTCAAGGGTCGCTTCACTATTTCCCG |
| | | GGACAACTCCAAGAATACCCTGTACCTCCAAATGAACAGCCTCAGG |
| | | GCCGAGGATACTGCCGTGTACTACTGCGCCAAAGTCGGATACGATA |
| | | GCTCCGGTTACTACCGGGACTACTACGGAATGGACGTGTGGGGACA |
| | | GGGCACCACCGTGACCGTGTCAAGCGGCGGAGGCGGTTCAGGAGG |
| | | GGGAGGCTCCGGCGGTGGAGGGTCCGAAATCGTCCTGACTCAGTCG |
| | | CCTGGCACTCTGTCGTTGTCCCCGGGGGAGCGCGCTACCCTGTCGTG |
| | | TCGGGCGTCGCAGTCCGTGTCGAGCTCCTACCTCGCGTGGTACCAG |
| | | CAGAAGCCCGGACAGGCCCCTAGACTTCTGATCTACGGCACTTCTT |
| | | CACGCGCCACCGGGATCAGCGACAGGTTCAGCGGCTCCGGCTCCGG |
| | | GACCGACTTCACCCTGACCATTAGCCGGCTGGAGCCTGAAGATTTC |
| | | GCCGTGTATTACTGCCAACACTACGGAAACTCGCCGCCAAAGTTCA |
| | | CGTTCGGACCCGGAACCAAGCTGGAAATCAAGACCACTACCCCAGC |
| | | ACCGAGGCCACCCACCCCGGCTCCTACCATCGCCTCCCAGCCTCTGT |
| | | CCCTGCGTCCGGAGGCATGTAGACCCGCAGCTGGTGGGGCCGTGCA |
| | | TACCCGGGGTCTTGACTTCGCCTGCGATATCTACATTTGGGCCCCTC |
| | | TGGCTGGTACTTGCGGGGTCCTGCTGCTTTCACTCGTGATCACTCTT |
| | | TACTGTAAGCGCGGTCGGAAGAAGCTGCTGTACATCTTTAAGCAAC |
| | | CCTTCATGAGGCCTGTGCAGACTACTCAAGAGGAGGACGGCTGTTC |
| | | ATGCCGGTTCCCAGAGGAGGAGGAAGGCGGCTGCGAACTGCGCGT |
| | | GAAATTCAGCCGCAGCGCAGATGCTCCAGCCTACAAGCAGGGGCA |
| | | GAACCAGCTCTACAACGAACTCAATCTTGGTCGGAGAGAGGAGTAC |
| | | GACGTGCTGGACAAGCGGAGAGGACGGGACCCAGAAATGGGCGGG |
| | | AAGCCGCGCAGAAAGAATCCCCAAGAGGGCCTGTACAACGAGCTC |
| | | CAAAAGGATAAGATGGCAGAAGCCTATAGCGAGATTGGTATGAAA |
| | | GGGGAACGCAGAAGAGGCAAAGGCCACGACGGACTGTACCAGGGA |
| | | CTCAGCACCGCCACCAAGGACACCTATGACGCTCTTCACATGCAGG |
| | | CCCTGCCGCCTCGG |

BCMA_EBB-C1978-G4

| | | |
|---|---|---|
| BCMA_EBB- | 149 | EVQLVESGGGLVQPGGSLRLSCAASGFTFSSYAMSWVRQAPGKGLEW |
| C1978-G4-aa | | VSAISGSGGSTYYADSVKGRFTISRDNSKNTLYLQMNSLRAEDTAVYY |
| ScFv domain | | CAKMGWSSGYLGAFDIWGQGTTVTVSSGGGGSGGGGSGGGGSEIVLT |
| | | QSPGTLSLSPGERATLSCRASQSVASSFLAWYQQKPGQAPRLLIYGASG |
| | | RATGIPDRFSGSGSGTDFTLTISRLEPEDFAVYYCQHYGGSPRLTFGGG |
| | | TKVDIK |
| BCMA_EBB- | 170 | GAAGTCCAACTGGTGGAGTCCGGGGGAGGGCTCGTGCAGCCCGGA |
| C1978-G4-nt | | GGCAGCCTTCGGCTGTCGTGCGCCGCCTCCGGGTTCACGTTCTCATC |
| ScFv domain | | CTACGCGATGTCGTGGGTCAGACAGGCACCAGGAAAGGGACTGGA |
| | | ATGGGTGTCCGCCATTAGCGGCTCCGGCGGTAGCACCTACTATGCC |
| | | GACTCAGTGAAGGGAAGGTTCACTATCTCCCGCGACAACAGCAAGA |
| | | ACACCCTGTACCTCCAAATGAACTCTCTGCGGGCCGAGGATACCGC |
| | | GGTGTACTATTGCGCCAAGATGGGTTGGTCCAGCGGATACTTGGGA |
| | | GCCTTCGACATTTGGGGACAGGGCACTACTGTGACCGTGTCCTCCG |
| | | GGGGTGGCGGATCGGGAGGCGGCGGCTCGGGTGGAGGGGGTTCCG |
| | | AAATCGTGTTGACCCAGTCACCGGGAACCCTCTCGCTGTCCCCGGG |
| | | AGAACGGGCTACACTGTCATGTAGAGCGTCCCAGTCCGTGGCTTCC |
| | | TCGTTCCTGGCCTGGTACCAGCAGAAGCCGGGACAGGCACCCCGCC |
| | | TGCTCATCTACGGAGCCAGCGGCCGGGCGACCGGCATCCCTGACCG |
| | | CTTCTCCGGTTCCGGCTCGGGCACCGACTTTACTCTGACCATTAGCA |
| | | GGCTTGAGCCCGAGGATTTTGCCGTGTACTACTGCCAACACTACGG |
| | | GGGGAGCCCTCGCCTGACCTTCGGAGGCGGAACTAAGGTCGATATC |
| | | AAAA |
| BCMA_EBB- | 191 | EVQLVESGGGLVQPGGSLRLSCAASGFTFSSYAMSWVRQAPGKGLEW |
| C1978-G4-aa | | VSAISGSGGSTYYADSVKGRFTISRDNSKNTLYLQMNSLRAEDTAVYY |
| VH | | CAKMGWSSGYLGAFDIWGQGTTVTVSS |
| BCMA_EBB- | 212 | EIVLTQSPGTLSLSPGERATLSCRASQSVASSFLAWYQQKPGQAPRLLI |
| C1978-G4-aa | | YGASGRATGIPDRFSGSGSGTDFTLTISRLEPEDFAVYYCQHYGGSPRL |
| VL | | TFGGGTKVDIK |
| BCMA_EBB- | 233 | MALPVTALLLPLALLLHAARPEVQLVESGGGLVQPGGSLRLSCAASGF |
| C1978-G4-aa | | TFSSYAMSWVRQAPGKGLEWVSAISGSGGSTYYADSVKGRFTISRDNS |
| Full CART | | KNTLYLQMNSLRAEDTAVYYCAKMGWSSGYLGAFDIWGQGTTVTVS |
| | | SGGGGSGGGGSGGGGSEIVLTQSPGTLSLSPGERATLSCRASQSVASSF |
| | | LAWYQQKPGQAPRLLIYGASGRATGIPDRFSGSGSGTDFTLTISRLEPE |
| | | DFAVYYCQHYGGSPRLTFGGGTKVDIKTTTPAPRPPTPAPTIASQPLSL |
| | | RPEACRPAAGGAVHTRGLDFACDIYIWAPLAGTCGVLLLSLVITLYCK |
| | | RGRKKLLYIFKQPFMRPVQTTQEEDGCSCRFPEEEEGGCELRVKFSRSA |
| | | DAPAYKQGQNQLYNELNLGRREEYDVLDKRRGRDPEMGGKPRRKNP |
| | | QEGLYNELQKDKMAEAYSEIGMKGERRRGKGHDGLYQGLSTATKDT |
| | | YDALHMQALPPR |
| BCMA_EBB- | 254 | ATGGCCCTCCCTGTCACCGCCCTGCTGCTTCCGCTGGCTCTTCTGCT |
| C1978-G4-nt | | CCACGCCGCTCGGCCCGAAGTCCAACTGGTGGAGTCCGGGGGAGG |
| Full CART | | GCTCGTGCAGCCCGGAGGCAGCCTTCGGCTGTCGTGCGCCGCCTCC |
| | | GGGTTCACGTTCTCATCCTACGCGATGTCGTGGGTCAGACAGGCAC |
| | | CAGGAAAGGGACTGGAATGGGTGTCCGCCATTAGCGGCTCCGGCG |
| | | GTAGCACCTACTATGCCGACTCAGTGAAGGGAAGGTTCACTATCTC |
| | | CCGCGACAACAGCAAGAACACCCTGTACCTCCAAATGAACTCTCTG |
| | | CGGGCCGAGGATACCGCGGTGTACTATTGCGCCAAGATGGGTTGGT |
| | | CCAGCGGATACTTGGGAGCCTTCGACATTTGGGGACAGGGCACTAC |
| | | TGTGACCGTGTCCTCCGGGGGTGGCGGATCGGGAGGCGGCGGCTCG |
| | | GGTGGAGGGGGTTCCGAAATCGTGTTGACCCAGTCACCGGGAACCC |
| | | TCTCGCTGTCCCCGGGAGAACGGGCTACACTGTCATGTAGAGCGTC |
| | | CCAGTCCGTGGCTTCCTCGTTCCTGGCCTGGTACCAGCAGAAGCCG |
| | | GGACAGGCACCCCGCCTGCTCATCTACGGAGCCAGCGGCCGGGCGA |
| | | CCGGCATCCCTGACCGCTTCTCCGGTTCCGGCTCGGGCACCGACTTT |
| | | ACTCTGACCATTAGCAGGCTTGAGCCCGAGGATTTTGCCGTGTACT |
| | | ACTGCCAACACTACGGGGGGAGCCCTCGCCTGACCTTCGGAGGCGG |
| | | AACTAAGGTCGATATCAAAACCACTACCCCAGCACCGAGGCCACCC |
| | | ACCCCGGCTCCTACCATCGCCTCCCAGCCTCTGTCCCTGCGTCCGGA |
| | | GGCATGTAGACCCGCAGCTGGTGGGGCCGTGCATACCCGGGGTCTT |
| | | GACTTCGCCTGCGATATCTACATTTGGGCCCCTCTGGCTGGTACTTG |
| | | CGGGGTCCTGCTGCTTTCACTCGTGATCACTCTTTACTGTAAGCGCG |
| | | GTCGGAAGAAGCTGCTGTACATCTTTAAGCAACCCTTCATGAGGCC |
| | | TGTGCAGACTACTCAAGAGGAGGACGGCTGTTCATGCCGGTTCCCA |
| | | GAGGAGGAGGAAGGCGGCTGCGAACTGCGCGTGAAATTCAGCCGC |
| | | AGCGCAGATGCTCCAGCCTACAAGCAGGGGCAGAACCAGCTCTAC |
| | | AACGAACTCAATCTTGGTCGGAGAGAGGAGTACGACGTGCTGGAC |
| | | AAGCGGAGAGGACGGGACCCAGAAATGGGCGGGAAGCCGCGCAG |
| | | AAAGAATCCCCAAGAGGGCCTGTACAACGAGCTCCAAAAGGATAA |
| | | GATGGCAGAAGCCTATAGCGAGATTGGTATGAAAGGGGAACGCAG |
| | | AAGAGGCAAAGGCCACGACGGACTGTACCAGGGACTCAGCACCGC |
| | | CACCAAGGACACCTATGACGCTCTTCACATGCAGGCCCTGCCGCCT |
| | | CGG |

TABLE 7
Exemplary Heavy Chain Variable Domain CDRs according to the Kabat Numbering
Scheme (Kabat et al. (1991), “Sequences of Proteins of Immunological
Interest,” 5th Ed. Public Health Service, National Institutes of Health,
Bethesda, MD)

| | | SEQ | | SEQ | | SEQ |
|---|---|---|---|---|---|---|
| | | ID | | ID | | ID |
| Candidate | HCDR1 | NO | HCDR2 | NO | HCDR3 | NO |
| 139109 | NHGMS | 1118 | GIVYSGSTYYAAS | 1158 | HGGESDV | 1198 |
| | | | VKG | | | |
| 139103 | NYAMS | 1119 | GISRSGENTYYAD | 1159 | SPAHYYGGMD | 1199 |
| | | | SVKG | | V | |
| 139105 | DYAMH | 1120 | GISWNSGSIGYAD | 1160 | HSFLAY | 1200 |
| | | | SVKG | | | |
| 139111 | NHGMS | 1121 | GIVYSGSTYYAAS | 1161 | HGGESDV | 1201 |
| | | | VKG | | | |
| 139100 | NFGIN | 1122 | WINPKNNNTNYA | 1162 | GPYYYQSYMD | 1202 |
| | | | QKFQG | | V | |
| 139101 | SDAMT | 1123 | VISGSGGTTYYAD | 1163 | LDSSGYYYARG | 1203 |
| | | | SVKG | | PRY | |
| 139102 | NYGIT | 1124 | WISAYNGNTNYA | 1164 | GPYYYYMDV | 1204 |
| | | | QKFQG | | | |
| 139104 | NHGMS | 1125 | GIVYSGSTYYAAS | 1165 | HGGESDV | 1205 |
| | | | VKG | | | |
| 139106 | NHGMS | 1126 | GIVYSGSTYYAAS | 1166 | HGGESDV | 1206 |
| | | | VKG | | | |
| 139107 | NHGMS | 1127 | GIVYSGSTYYAAS | 1167 | HGGESDV | 1207 |
| | | | VKG | | | |
| 139108 | DYYMS | 1128 | YISSSGSTIYYADS | 1168 | ESGDGMDV | 1208 |
| | | | VKG | | | |
| 139110 | DYYMS | 1129 | YISSSGNTIYYADS | 1169 | STMVREDY | 1209 |
| | | | VKG | | | |
| 139112 | NHGMS | 1130 | GIVYSGSTYYAAS | 1170 | HGGESDV | 1210 |
| | | | VKG | | | |
| 139113 | NHGMS | 1131 | GIVYSGSTYYAAS | 1171 | HGGESDV | 1211 |
| | | | VKG | | | |
| 139114 | NHGMS | 1132 | GIVYSGSTYYAAS | 1172 | HGGESDV | 1212 |
| | | | VKG | | | |
| 149362 | SSYYYW | 1133 | SIYYSGSAYYNPS | 1173 | HWQEWPDAFDI | 1213 |
| | G | | LKS | | | |
| 149363 | TSGMCV | 1134 | RIDWDEDKFYSTS | 1174 | SGAGGTSATAF | 1214 |
| | S | | LKT | | DI | |
| 149364 | SYSMN | 1135 | SISSSSSYIYYADS | 1175 | TIAAVYAFDI | 1215 |
| | | | VKG | | | |
| 149365 | DYYMS | 1136 | YISSSGSTIYYADS | 1176 | DLRGAFDI | 1216 |
| | | | VKG | | | |
| 149366 | SHYIH | 1137 | MINPSGGVTAYSQ | 1177 | EGSGSGWYFDF | 1217 |
| | | | TLQG | | | |
| 149367 | SGGYY | 1138 | YIYYSGSTYYNPS | 1178 | AGIAARLRGAF | 1218 |
| | WS | | LKS | | DI | |
| 149368 | SYAIS | 1139 | GIIPIFGTANYAQK | 1179 | RGGYQLLRWD | 1219 |
| | | | FQG | | VGLLRSAFDI | |
| 149369 | SNSAAW | 1140 | RTYYRSKWYSFY | 1180 | SSPEGLFLYWF | 1220 |
| | N | | AISLKS | | DP | |
| BCMA EB | SYAMS | 1141 | AISGSGGSTYYAD | 1181 | VEGSGSLDY | 1221 |
| B-C1978- | | | SVKG | | | |
| A4 | | | | | | |
| BCMA EB | RYPMS | 1142 | GISDSGVSTYYAD | 1182 | RAGSEASDI | 1222 |
| B-C1978- | | | SAKG | | | |
| G1 | | | | | | |
| BCMA EB | SYAMS | 1143 | AISGSGGSTYYAD | 1183 | ATYKRELRYYY | 1223 |
| B-C1979- | | | SVKG | | GMDV | |
| C1 | | | | | | |
| BCMA EB | SYAMS | 1144 | AISGSGGSTYYAD | 1184 | ATYKRELRYYY | 1224 |
| B-C1978- | | | SVKG | | GMDV | |
| C7 | | | | | | |
| BCMA EB | DYAMH | 1145 | GISWNSGSIGYAD | 1185 | VGKAVPDV | 1225 |
| B-C1978- | | | SVKG | | | |
| D10 | | | | | | |
| BCMA EB | DYAMH | 1146 | SINWKGNSLAYG | 1186 | HQGVAYYNYA | 1226 |
| B-C1979- | | | DSVKG | | MDV | |
| C12 | | | | | | |
| BCMA EB | SYAMS | 1147 | AISGSGGSTYYAD | 1187 | VVRDGMDV | 1227 |
| B-C1980- | | | SVKG | | | |
| G4 | | | | | | |
| BCMA EB | SYAMS | 1148 | AISGSGGSTYYAD | 1188 | IPQTGTFDY | 1228 |
| B-C1980- | | | SVKG | | | |
| D2 | | | | | | |
| BCMA EB | SYAMS | 1149 | AISGSGGSTYYAD | 1189 | ANYKRELRYYY | 1229 |
| B-C1978- | | | SVKG | | GMDV | |
| A10 | | | | | | |
| BCMA EB | SYAMS | 1150 | AISGSGGSTYYAD | 1190 | ALVGATGAFDI | 1230 |
| B-C1978- | | | SVKG | | | |
| D4 | | | | | | |
| BCMA EB | SYAMS | 1151 | AISGSGGSTYYAD | 1191 | WFGEGFDP | 1231 |
| B-C1980- | | | SVKG | | | |
| A2 | | | | | | |
| BCMA EB | SYAMS | 1152 | AISGSGGSTYYAD | 1192 | VGYDSSGYYRD | 1232 |
| B-C1981- | | | SVKG | | YYGMDV | |
| C3 | | | | | | |
| BCMA EB | SYAMS | 1153 | AISGSGGSTYYAD | 1193 | MGWSSGYLGA | 1233 |
| B-C1978- | | | SVKG | | FDI | |
| G4 | | | | | | |
| A7D12.2 | NFGMN | 1154 | WINTYTGESYFAD | 1194 | GEIYYGYDGGF | 1234 |
| | | | DFKG | | AY | |
| C11D5.3 | DYSIN | 1155 | WINTETREPAYAY | 1195 | DYSYAMDY | 1235 |
| | | | DFRG | | | |
| C12A3.2 | HYSMN | 1156 | RINTESGVPIYADD | 1196 | DYLYSLDF | 1236 |
| | | | FKG | | | |
| C13F12.1 | HYSMN | 1157 | RINTETGEPLYAD | 1197 | DYLYSCDY | 1237 |
| | | | DFKG | | | |

TABLE 8
Exemplary Light Chain Variable Domain CDRs according to the Kabat numbering
scheme (Kabat et al. (1991), “Sequences of Proteins of Immunological
Interest,” 5th Ed. Public Health Service, National Institutes
of Health, Bethesda, MD)

| | | SEQ | | SEQ | | SEQ |
|---|---|---|---|---|---|---|
| | | ID | | ID | | ID |
| Candidate | LCDR1 | NO | LCDR2 | NO | LCDR3 | NO |
| 139109 | RASQSISSYLN | 1238 | AASSLQS | 1278 | QQSYSTPYT | 1318 |
| 139103 | RASQSISSSFLA | 1239 | GASRRAT | 1279 | QQYHSSPSWT | 1319 |
| 139105 | RSSQSLLHSNGYNY | 1240 | LGSNRAS | 1280 | MQALQTPYT | 1320 |
| | LD | | | | | |
| 139111 | KSSQSLLRNDGKTP | 1241 | EVSNRFS | 1281 | MQNIQFPS | 1321 |
| | LY | | | | | |
| 139100 | RSSQSLLHSNGYNY | 1242 | LGSKRAS | 1282 | MQALQTPYT | 1322 |
| | LN | | | | | |
| 139101 | RASQSISSYLN | 1243 | GASTLAS | 1283 | QQSYKRAS | 1323 |
| 139102 | RSSQSLLYSNGYNY | 1244 | LGSNRAS | 1284 | MQGRQFPYS | 1324 |
| | VD | | | | | |
| 139104 | RASQSVSSNLA | 1245 | GASTRAS | 1285 | QQYGSSLT | 1325 |
| 139106 | RASQSVSSKLA | 1246 | GASIRAT | 1286 | QQYGSSSWT | 1326 |
| 139107 | RASQSVGSTNLA | 1247 | DASNRAT | 1287 | QQYGSSPPWT | 1327 |
| 139108 | RASQSISSYLN | 1248 | AASSLQS | 1288 | QQSYTLA | 1328 |
| 139110 | KSSESLVHNSGKTY | 1249 | EVSNRDS | 1289 | MQGTHWPGT | 1329 |
| | LN | | | | | |
| 139112 | QASEDINKFLN | 1250 | DASTLQT | 1290 | QQYESLPLT | 1330 |
| 139113 | RASQSVGSNLA | 1251 | GASTRAT | 1291 | QQYNDWLPV | 1331 |
| | | | | | T | |
| 139114 | RASQSIGSSSLA | 1252 | GASSRAS | 1292 | QQYAGSPPFT | 1332 |
| 149362 | KASQDIDDAMN | 1253 | SATSPVP | 1293 | LQHDNFPLT | 1333 |
| 149363 | RASQDIYNNLA | 1254 | AANKSQS | 1294 | QHYYRFPYS | 1334 |
| 149364 | RSSQSLLHSNGY | 1255 | LGSNRAS | 1295 | MQALQTPYT | 1335 |
| | NYLD | | | | | |
| 149365 | GGNNIGTKSVH | 1256 | DDSVRPS | 1296 | QVWDSDSEH | 1336 |
| | | | | | VV | |
| 149366 | SGDGLSKKYVS | 1257 | RDKERPS | 1297 | QAWDDTTVV | 1337 |
| 149367 | RASQGIRNWLA | 1258 | AASNLQS | 1298 | QKYNSAPFT | 1338 |
| 149368 | GGNNIGSKSVH | 1259 | GKNNRPS | 1299 | SSRDSSGDHL | 1339 |
| | | | | | RV | |
| 149369 | QGDSLGNYYAT | 1260 | GTNNRPS | 1300 | NSRDSSGHHL | 1340 |
| | | | | | L | |
| BCMA EBB | RASQSVSSAYLA | 1261 | GASTRAT | 1301 | QHYGSSFNGS | 1341 |
| -C1978-A4 | | | | | SLFT | |
| BCMA EBB | RASQSVSNSLA | 1262 | DASSRAT | 1302 | QQFGTSSGLT | 1342 |
| -C1978-G1 | | | | | | |
| BCMA EBB | RASQSVSSSFLA | 1263 | GASSRAT | 1303 | QQYHSSPSWT | 1343 |
| -C1979-C1 | | | | | | |
| BCMA EBB | RASQSVSTTFLA | 1264 | GSSNRAT | 1304 | QQYHSSPSWT | 1344 |
| -C1978-C7 | | | | | | |
| BCMA EBB | RASQSISSYLN | 1265 | AASSLQS | 1305 | QQSYSTPYS | 1345 |
| -C1978-D10 | | | | | | |
| BCMA EBB | RATQSIGSSFLA | 1266 | GASQRAT | 1306 | QHYESSPSWT | 1346 |
| -C1979-C12 | | | | | | |
| BCMA EBB | RASQSVSSSYLA | 1267 | GASSRAT | 1307 | QQYGSPPRFT | 1347 |
| -C1980-G4 | | | | | | |
| BCMA EBB | RASQSVSSSYLA | 1268 | GASSRAT | 1308 | QHYGSSPSWT | 1348 |
| -C1980-D2 | | | | | | |
| BCMA EBB | RASQRVASNYLA | 1269 | GASSRAT | 1309 | QHYDSSPSWT | 1349 |
| -C1978-A10 | | | | | | |
| BCMA EBB | RASQSLSSNFLA | 1270 | GASNWAT | 1310 | QYYGTSPMY | 1350 |
| C1978-D4 | | | | | T | |
| BCMA EBB | RSSQSLLHSNGYNY | 1271 | LGSNRAS | 1311 | MQALQTPLT | 1351 |
| -C1980-A2 | LD | | | | | |
| BCMA EBB | RASQSVSSSYLA | 1272 | GTSSRAT | 1312 | QHYGNSPPKF | 1352 |
| -C1981-C3 | | | | | T | |
| BCMA EBB | RASQSVASSFLA | 1273 | GASGRAT | 1313 | QHYGGSPRLT | 1353 |
| -C1978-G4 | | | | | | |
| A7D12.2 | RASQDVNTAVS | 1274 | SASYRYT | 1314 | QQHYSTPWT | 1354 |
| C11D5.3 | RASESVSVIGAHLI | 1275 | LASNLET | 1315 | LQSRIFPRT | 1355 |
| | H | | | | | |
| C12A3.2 | RASESVTILGSHLIY | 1276 | LASNVQT | 1316 | LQSRTIPRT | 1356 |
| C13F12.1 | RASESVTILGSHLIY | 1277 | LASNVQT | 1317 | LQSRTIPRT | 1357 |

### CD20 CAR and CD20-Binding Sequences

[0495] In some embodiments, the CAR or CAR-expressing cell described herein is a CD20 CAR-expressing cell (e.g., a cell expressing a CAR molecule that binds to human CD20). In some embodiments, the CD20 CAR-expressing cell includes an antigen-binding domain according to WO2016/164731 and PCT/US2017/055627, incorporated herein by reference. Exemplary CD20-binding sequences or CD20 CAR sequences are disclosed in, e.g., Tables 1-5 of PCT/US2017/055627. In some embodiments, the CD20-binding sequences or CD20 CAR comprises a CDR, variable region, scFv, or full-length sequence of a CD20 CAR disclosed in PCT/US2017/055627 or WO2016/164731.

[0496] In some embodiments, the CAR molecule comprises an antigen-binding domain that binds specifically to CD20 (CD20 CAR). In some embodiments, the antigen-binding domain targets human CD20. In some embodiments, the antigen-binding domain includes a single chain Fv sequence as described herein. The sequences of human CD20 CAR are provided below.

TABLE 9
Exemplary CD20 CAR Constructs

| SEQ ID | | |
|---|---|---|
| NUMBER | Ab region | Sequence |
| CD20-C3H2 | | |
| SEQ ID NO: | HCDR1 | NYNLH |
| 2019 (Kabat) | | |
| SEQ ID NO: | HCDR2 | AIYPGNYDTSYNQKFKG |
| 2020 (Kabat) | | |
| SEQ ID NO: | HCDR3 | VDFGHSRYWYFDV |
| 2021 (Kabat) | | |
| SEQ ID NO: | HCDR1 | GYTFTNY |
| 2022 (Chothia) | | |
| SEQ ID NO: | HCDR2 | YPGNYD |
| 2023 (Chothia) | | |
| SEQ ID NO: | HCDR3 | VDFGHSRYWYFDV |
| 2021 (Chothia) | | |
| SEQ ID NO: | HCDR1 | GYTFTNYN |
| 2024 (IMGT) | | |
| SEQ ID NO: | HCDR2 | IYPGNYDT |
| 2025 (IMGT) | | |
| SEQ ID NO: | HCDR3 | ARVDFGHSRYWYFDV |
| 2026 (IMGT) | | |
| SEQ ID NO: | HCDR1 | GYTFTNYNLH |
| 2027 (Combined | | |
| Chothia and | | |
| Kabat) | | |
| SEQ ID NO: | HCDR2 | AIYPGNYDTSYNQKFKG |
| 2020 (Combined | | |
| Chothia and | | |
| Kabat) | | |
| SEQ ID NO: | HCDR3 | VDFGHSRYWYFDV |
| 2021 (Combined | | |
| Chothia and | | |
| Kabat) | | |
| SEQ ID NO: | VH | QVQLVQSGAEVKKPGASVKVSCKASGYTFTNYNLHWV |
| 2028 | | RQAPGQGLEWMGAIYPGNYDTSYNQKFKGRVTMTAD |
| | | KSTSTAYMELSSLRSEDTAVYYCARVDFGHSRYWYFD |
| | | VWGQGTTVTVSS |
| SEQ ID NO: | DNA VH | CAAGTCCAACTCGTCCAGTCCGGTGCAGAAGTCAAG |
| 2029 | | AAACCTGGAGCATCCGTGAAAGTGTCTTGCAAAGCCT |
| | | CCGGCTACACCTTCACCAACTACAACCTCCATTGGGT |
| | | CAGACAGGCCCCCGGACAAGGACTCGAATGGATGGG |
| | | AGCGATCTACCCGGGAAACTACGACACCAGCTACAA |
| | | CCAGAAGTTCAAGGGCCGCGTGACTATGACCGCCGA |
| | | TAAGAGCACCTCCACCGCCTACATGGAACTGTCCTCG |
| | | CTGAGGTCCGAGGACACTGCGGTGTACTACTGCGCCC |
| | | GCGTGGACTTCGGACACTCACGGTATTGGTACTTCGA |
| | | CGTCTGGGGACAGGGCACTACCGTGACCGTGTCGAG |
| | | C |
| SEQ ID NO: | LCDR1 | RATSSVSSMN |
| 2030 (Kabat) | | |
| SEQ ID NO: | LCDR2 | ATSNLAS |
| 2031 (Kabat) | | |
| SEQ ID NO: | LCDR3 | QQWTFNPPT |
| 2032 (Kabat) | | |
| SEQ ID NO: | LCDR1 | TSSVSS |
| 2033 (Chothia) | | |
| SEQ ID NO: | LCDR2 | ATS |
| 2034 (Chothia) | | |
| SEQ ID NO: | LCDR3 | WTFNPP |
| 2035 (Chothia) | | |
| SEQ ID NO: | LCDR1 | SSVSS |
| 2036 (IMGT) | | |
| SEQ ID NO: | LCDR2 | ATS |
| 2034 (IMGT) | | |
| SEQ ID NO: | LCDR3 | QQWTFNPPT |
| 2032 (IMGT) | | |
| SEQ ID NO | LCDR1 | RATSSVSSMN |
| 2030 (Combined | | |
| Chothia and | | |
| Kabat) | | |
| SEQ ID NO: | LCDR2 | ATSNLAS |
| 2031 (Combined | | |
| Chothia and | | |
| Kabat) | | |
| SEQ ID NO: | LCDR3 | QQWTFNPPT |
| 2032 (Combined | | |
| Chothia and | | |
| Kabat) | | |
| SEQ ID NO: | VL | DIQLTQSPSFLSASVGDRVTITCRATSSVSSMNWYQQKP |
| 2037 | | GKAPKPLIHATSNLASGVPSRFSGSGSGTEYTLTISSLQP |
| | | EDFATYYCQQWTFNPPTFGQGTKLEIK |
| SEQ ID NO: | DNA VL | GATATCCAGCTGACTCAGTCCCCGTCATTCCTGTCCG |
| 2038 | | CCTCCGTGGGAGACAGAGTGACCATCACCTGTCGGG |
| | | CCACTTCCTCCGTGTCAAGCATGAACTGGTATCAGCA |
| | | GAAGCCCGGGAAGGCCCCAAAGCCGCTGATTCACGC |
| | | GACGTCCAACCTGGCTTCCGGCGTGCCGAGCCGGTTC |
| | | TCCGGCTCGGGGAGCGGGACTGAGTACACCCTGACT |
| | | ATTTCCTCGCTTCAACCCGAGGACTTTGCTACCTACT |
| | | ACTGCCAACAGTGGACCTTCAATCCTCCGACATTCGG |
| | | ACAGGGTACCAAGTIGGAAATCAAG |
| SEQ ID NO: | Linker | GGGGSGGGGSGGGGSGGGGS |
| 1010 | | |
| SEQ ID NO: | scFv (VH- | QVQLVQSGAEVKKPGASVKVSCKASGYTFTNYNLHWV |
| 2039 | linker-VL) | RQAPGQGLEWMGAIYPGNYDTSYNQKFKGRVTMTAD |
| | | KSTSTAYMELSSLRSEDTAVYYCARVDFGHSRYWYFD |
| | | VWGQGTTVTVSSGGGGSGGGGSGGGGSGGGGSDIQLT |
| | | QSPSFLSASVGDRVTITCRATSSVSSMNWYQQKPGKAP |
| | | KPLIHATSNLASGVPSRFSGSGSGTEYTLTISSLQPED |
| | | FATYYCQQWTFNPPTFGQGTKLEIK |
| SEQ ID NO: | DNA scFv | CAAGTCCAACTCGTCCAGTCCGGTGCAGAAGTCAAG |
| 2040 | (VH-linker- | AAACCTGGAGCATCCGTGAAAGTGTCTTGCAAAGCCT |
| | VL) | CCGGCTACACCTTCACCAACTACAACCTCCATTGGGT |
| | | CAGACAGGCCCCCGGACAAGGACTCGAATGGATGGG |
| | | AGCGATCTACCCGGGAAACTACGACACCAGCTACAA |
| | | CCAGAAGTTCAAGGGCCGCGTGACTATGACCGCCGA |
| | | TAAGAGCACCTCCACCGCCTACATGGAACTGTCCTCG |
| | | CTGAGGTCCGAGGACACTGCGGTGTACTACTGCGCCC |
| | | GCGTGGACTTCGGACACTCACGGTATTGGTACTTCGA |
| | | CGTCTGGGGACAGGGCACTACCGTGACCGTGTCGAG |
| | | CGGCGGAGGAGGTTCGGGAGGGGGCGGATCAGGGG |
| | | GCGGCGGCAGCGGTGGAGGGGGCTCGGATATCCAGC |
| | | TGACTCAGTCCCCGTCATTCCTGTCCGCCTCCGTGGG |
| | | AGACAGAGTGACCATCACCTGTCGGGCCACTTCCTCC |
| | | GTGTCAAGCATGAACTGGTATCAGCAGAAGCCCGGG |
| | | AAGGCCCCAAAGCCGCTGATTCACGCGACGTCCAAC |
| | | CTGGCTTCCGGCGTGCCGAGCCGGTTCTCCGGCTCGG |
| | | GGAGCGGGACTGAGTACACCCTGACTATTTCCTCGCT |
| | | TCAACCCGAGGACTTTGCTACCTACTACTGCCAACAG |
| | | TGGACCTTCAATCCTCCGACATTCGGACAGGGTACCA |
| | | AGTTGGAAATCAAG |
| SEQ ID NO: | Full CAR | MALPVTALLLPLALLLHAARPQVQLVQSGAEVKKPGAS |
| 2041 | amino acid | VKVSCKASGYTFTNYNLHWVRQAPGQGLEWMGAIYP |
| | sequence | GNYDTSYNQKFKGRVTMTADKSTSTAYMELSSLRSED |
| | | TAVYYCARVDFGHSRYWYFDVWGQGTTVTVSSGGGG |
| | | SGGGGSGGGGSGGGGSDIQLTQSPSFLSASVGDRVTITC |
| | | RATSSVSSMNWYQQKPGKAPKPLIHATSNLASGVPSRF |
| | | SGSGSGTEYTLTISSLQPEDFATYYCQQWTFNPPTFGQG |
| | | TKLEIKTTTPAPRPPTPAPTIASQPLSLRPEACRPAAGGA |
| | | VHTRGLDFACDIYIWAPLAGTCGVLLLSLVITLYCKRGR |
| | | KKLLYIFKQPFMRPVQTTQEEDGCSCRFPEEEEGGCELR |
| | | VKFSRSADAPAYQQGQNQLYNELNLGRREEYDVLDKR |
| | | RGRDPEMGGKPRRKNPQEGLYNELQKDKMAEAYSEIG |
| | | MKGERRRGKGHDGLYQGLSTATKDTYDALHMQALPP |
| | | R |
| SEQ ID NO: | Full CAR | ATGGCCCTCCCTGTCACCGCCCTGCTGCTTCCGCTGG |
| 2042 | nucleic acid | CTCTTCTGCTCCACGCCGCTCGGCCCCAAGTCCAACT |
| | sequence | CGTCCAGTCCGGTGCAGAAGTCAAGAAACCTGGAGC |
| | | ATCCGTGAAAGTGTCTTGCAAAGCCTCCGGCTACACC |
| | | TTCACCAACTACAACCTCCATTGGGTCAGACAGGCCC |
| | | CCGGACAAGGACTCGAATGGATGGGAGCGATCTACC |
| | | CGGGAAACTACGACACCAGCTACAACCAGAAGTTCA |
| | | AGGGCCGCGTGACTATGACCGCCGATAAGAGCACCT |
| | | CCACCGCCTACATGGAACTGTCCTCGCTGAGGTCCGA |
| | | GGACACTGCGGTGTACTACTGCGCCCGCGTGGACTTC |
| | | GGACACTCACGGTATTGGTACTTCGACGTCTGGGGAC |
| | | AGGGCACTACCGTGACCGTGTCGAGCGGCGGAGGAG |
| | | GTTCGGGAGGGGGCGGATCAGGGGGCGGCGGCAGCG |
| | | GTGGAGGGGGCTCGGATATCCAGCTGACTCAGTCCCC |
| | | GTCATTCCTGTCCGCCTCCGTGGGAGACAGAGTGACC |
| | | ATCACCTGTCGGGCCACTTCCTCCGTGTCAAGCATGA |
| | | ACTGGTATCAGCAGAAGCCCGGGAAGGCCCCAAAGC |
| | | CGCTGATTCACGCGACGTCCAACCTGGCTTCCGGCGT |
| | | GCCGAGCCGGTTCTCCGGCTCGGGGAGCGGGACTGA |
| | | GTACACCCTGACTATTTCCTCGCTTCAACCCGAGGAC |
| | | TTTGCTACCTACTACTGCCAACAGTGGACCTTCAATC |
| | | CTCCGACATTCGGACAGGGTACCAAGTTGGAAATCA |
| | | AGACCACTACCCCAGCACCGAGGCCACCCACCCCGG |
| | | CTCCTACCATCGCCTCCCAGCCTCTGTCCCTGCGTCCG |
| | | GAGGCATGTAGACCCGCAGCTGGTGGGGCCGTGCAT |
| | | ACCCGGGGTCTTGACTTCGCCTGCGATATCTACATTT |
| | | GGGCCCCTCTGGCTGGTACTTGCGGGGTCCTGCTGCT |
| | | TTCACTCGTGATCACTCTTTACTGTAAGCGCGGTCGG |
| | | AAGAAGCTGCTGTACATCTTTAAGCAACCCTTCATGA |
| | | GGCCTGTGCAGACTACTCAAGAGGAGGACGGCTGTT |
| | | CATGCCGGTTCCCAGAGGAGGAGGAAGGCGGCTGCG |
| | | AACTGCGCGTGAAATTCAGCCGCAGCGCAGATGCTC |
| | | CAGCCTACCAGCAGGGGCAGAACCAGCTCTACAACG |
| | | AACTCAATCTTGGTCGGAGAGAGGAGTACGACGTGC |
| | | TGGACAAGCGGAGAGGACGGGACCCAGAAATGGGC |
| | | GGGAAGCCGCGCAGAAAGAATCCCCAAGAGGGCCTG |
| | | TACAACGAGCTCCAAAAGGATAAGATGGCAGAAGCC |
| | | TATAGCGAGATTGGTATGAAAGGGGAACGCAGAAGA |
| | | GGCAAAGGCCACGACGGACTGTACCAGGGACTCAGC |
| | | ACCGCCACCAAGGACACCTATGACGCTCTTCACATGC |
| | | AGGCCCTGCCGCCTCGG |
| CD20-C5H1 | | |
| SEQ ID NO: | HCDR1 | SYNMH |
| 2043 (Kabat) | | |
| SEQ ID NO: | HCDR2 | AIYPGNGDTSYNPKFKG |
| 2044 (Kabat) | | |
| SEQ ID NO: | HCDR3 | SYFYGSSSWYFDV |
| 2045 (Kabat) | | |
| SEQ ID NO: | HCDR1 | GYTFTSY |
| 2046 (Chothia) | | |
| SEQ ID NO: | HCDR2 | YPGNGD |
| 2047 (Chothia) | | |
| SEQ ID NO: | HCDR3 | SYFYGSSSWYFDV |
| 2045 (Chothia) | | |
| SEQ ID NO: | HCDR1 | GYTFTSYN |
| 2048 (IMGT) | | |
| SEQ ID NO: | HCDR2 | IYPGNGDT |
| 2049 (IMGT) | | |
| SEQ ID NO: | HCDR3 | ARSYFYGSSSWYFDV |
| 2050 (IMGT) | | |
| SEQ ID NO: | HCDR1 | GYTFTSYNMH |
| 2051 (Combined | | |
| Chothia and | | |
| Kabat) | | |
| SEQ ID NO: | HCDR2 | AIYPGNGDTSYNPKFKG |
| 2044 (Combined | | |
| Chothia and | | |
| Kabat | | |
| SEQ ID NO: | HCDR3 | SYFYGSSSWYFDV |
| 2045 (Combined | | |
| Chothia and | | |
| Kabat) | | |
| SEQ ID NO: | VH | QVQLVQSGAEVKKPGASVKVSCKASGYTFTSYNMHW |
| 2052 | | VRQAPGQGLEWMGAIYPGNGDTSYNPKFKGRVTMTA |
| | | DKSTRTAYMELSSLRSEDTAVYYCARSYFYGSSSWYFD |
| | | VWGQGTTVTVSS |
| SEQ ID NO: | DNA VH | CAAGTGCAGCTCGTCCAGTCCGGTGCAGAAGTCAAG |
| 2053 | | AAACCCGGTGCTTCAGTGAAAGTGTCCTGCAAGGCCT |
| | | CCGGTTACACCTTCACCTCCTACAACATGCACTGGGT |
| | | CCGCCAAGCCCCGGGCCAGGGACTCGAATGGATGGG |
| | | AGCCATCTACCCTGGCAACGGGGACACCTCATACAA |
| | | CCCTAAGTTCAAGGGCAGAGTGACCATGACTGCGGA |
| | | CAAGTCCACTAGAACAGCGTACATGGAGCTGAGCAG |
| | | CCTGCGGTCCGAGGATACTGCCGTGTACTACTGCGCC |
| | | CGCTCCTACTTCTACGGAAGCTCGTCGTGGTACTTCG |
| | | ATGTCTGGGGACAGGGCACCACTGTGACTGTGTCCTC |
| | | C |
| SEQ ID NO: | LCDR1 | RASSSVSSMH |
| 2054 (Kabat) | | |
| SEQ ID NO: | LCDR2 | ATSNLAS |
| 2031 (Kabat) | | |
| SEQ ID NO: | LCDR3 | QQWIFNPPT |
| 2055 (Kabat) | | |
| SEQ ID NO: | LCDR1 | SSSVSS |
| 2056 (Chothia) | | |
| SEQ ID NO: | LCDR2 | ATS |
| 2034 (Chothia) | | |
| SEQ ID NO: | LCDR3 | WIFNPP |
| 2057 (Chothia) | | |
| SEQ ID NO: | LCDR1 | SSVSS |
| 2036 (IMGT) | | |
| SEQ ID NO. | LCDR2 | ATS |
| 2034 (IMGT) | | |
| SEQ ID NO: | LCDR3 | QQWIFNPPT |
| 2055 (IMGT) | | |
| SEQ ID NO: | LCDR1 | RASSSVSSMH |
| 2054 (Combined | | |
| Chothia and | | |
| Kabat) | | |
| SEQ ID NO: | LCDR2 | ATSNLAS |
| 2031 (Combined | | |
| Chothia and | | |
| Kabat) | | |
| SEQ ID NO: | LCDR3 | QQWIFNPPT |
| 2055 | | |
| (Combined | | |
| Chothia and | | |
| Kabat) | | |
| SEQ ID NO: | VL | EIVLTQSPATLSLSPGERATLSCRASSSVSSMHWYQQKP |
| 2058 | | GQAPRPLIFATSNLASGIPARFSGSGSGTDYTLTISSLEPE |
| | | DAAVYYCQQWIFNPPTFGGGTKVEIK |
| SEQ ID NO: | DNA VL | GAAATTGTGCTGACTCAGAGCCCCGCCACCCTGAGCT |
| 2059 | | TGTCCCCCGGGGAAAGGGCAACGCTGTCATGCCGCG |
| | | CCTCGTCATCCGTGTCCTCCATGCATTGGTACCAGCA |
| | | GAAGCCGGGACAGGCCCCTCGGCCGCTGATCTTCGCC |
| | | ACCTCCAATCTCGCTTCCGGCATTCCGGCCCGGTTCT |
| | | CGGGAAGCGGGTCGGGGACCGACTATACCCTGACCA |
| | | TCTCTAGCCTTGAACCTGAGGACGCCGCGGTGTACTA |
| | | TTGTCAACAGTGGATCTTTAACCCCCCAACCTTCGGT |
| | | GGAGGCACCAAAGTGGAGATTAAG |
| SEQ ID NO: | Linker | GGGGSGGGGSGGGGSGGGGS |
| 1010 | | |
| SEQ ID NO: | scFv (VH- | QVQLVQSGAEVKKPGASVKVSCKASGYTFTSYNMHW |
| 2060 | linker-VL) | VRQAPGQGLEWMGAIYPGNGDTSYNPKFKGRVTMTA |
| | | DKSTRTAYMELSSLRSEDTAVYYCARSYFYGSSSWYFD |
| | | VWGQGTTVTVSSGGGGSGGGGSGGGGSGGGGSEIVLT |
| | | QSPATLSLSPGERATLSCRASSSVSSMHWYQQKPGQAP |
| | | RPLIFATSNLASGIPARFSGSGSGTDYTLTISSLEPED |
| | | AAVYYCQQWIFNPPTFGGGTKVEIK |
| SEQ ID NO: | DNA scFv | CAAGTGCAGCTCGTCCAGTCCGGTGCAGAAGTCAAG |
| 2061 | (VH-linker- | AAACCCGGTGCTTCAGTGAAAGTGTCCTGCAAGGCCT |
| | VL) | CCGGTTACACCTTCACCTCCTACAACATGCACTGGGT |
| | | CCGCCAAGCCCCGGGCCAGGGACTCGAATGGATGGG |
| | | AGCCATCTACCCTGGCAACGGGGACACCTCATACAA |
| | | CCCTAAGTTCAAGGGCAGAGTGACCATGACTGCGGA |
| | | CAAGTCCACTAGAACAGCGTACATGGAGCTGAGCAG |
| | | CCTGCGGTCCGAGGATACTGCCGTGTACTACTGCGCC |
| | | CGCTCCTACTTCTACGGAAGCTCGTCGTGGTACTTCG |
| | | ATGTCTGGGGACAGGGCACCACTGTGACTGTGTCCTC |
| | | CGGTGGCGGAGGCTCGGGCGGAGGCGGAAGCGGCGG |
| | | CGGGGGATCGGGAGGAGGAGGGTCCGAAATTGTGCT |
| | | GACTCAGAGCCCCGCCACCCTGAGCTTGTCCCCCGGG |
| | | GAAAGGGCAACGCTGTCATGCCGCGCCTCGTCATCCG |
| | | TGTCCTCCATGCATTGGTACCAGCAGAAGCCGGGACA |
| | | GGCCCCTCGGCCGCTGATCTTCGCCACCTCCAATCTC |
| | | GCTTCCGGCATTCCGGCCCGGTTCTCGGGAAGCGGGT |
| | | CGGGGACCGACTATACCCTGACCATCTCTAGCCTTGA |
| | | ACCTGAGGACGCCGCGGTGTACTATTGTCAACAGTGG |
| | | ATCTTTAACCCCCCAACCTTCGGTGGAGGCACCAAAG |
| | | TGGAGATTAAG |
| SEQ ID NO: | Full CAR | MALPVTALLLPLALLLHAARPQVQLVQSGAEVKKPGAS |
| 2062 | amino acid | VKVSCKASGYTFTSYNMHWVRQAPGQGLEWMGAIYP |
| | | GNGDTSYNPKFKGRVTMTADKSTRTAYMELSSLRSEDT |
| | | AVYYCARSYFYGSSSWYFDVWGQGTTVTVSSGGGGSG |
| | | GGGSGGGGSGGGGSEIVLTQSPATLSLSPGERATLSCRA |
| | | SSSVSSMHWYQQKPGQAPRPLIFATSNLASGIPARFSGS |
| | | GSGTDYTLTISSLEPEDAAVYYCQQWIFNPPTFGGGTKV |
| | | EIKTTTPAPRPPTPAPTIASQPLSLRPEACRPAAGGAVHT |
| | | RGLDFACDIYIWAPLAGTCGVLLLSLVITLYCKRGRKKL |
| | | LYIFKQPFMRPVQTTQEEDGCSCRFPEEEEGGCELRVKF |
| | | SRSADAPAYQQGQNQLYNELNLGRREEYDVLDKRRGR |
| | | DPEMGGKPRRKNPQEGLYNELQKDKMAEAYSEIGMKG |
| | | ERRRGKGHDGLYQGLSTATKDTYDALHMQALPPR |
| SEQ ID NO: | sequence | ATGGCCCTCCCTGTCACCGCCCTGCTGCTTCCGCTGG |
| 2063 | Full CAR | CTCTTCTGCTCCACGCCGCTCGGCCCCAAGTGCAGCT |
| | nucleic acid | CGTCCAGTCCGGTGCAGAAGTCAAGAAACCCGGTGC |
| | sequence | TTCAGTGAAAGTGTCCTGCAAGGCCTCCGGTTACACC |
| | | TTCACCTCCTACAACATGCACTGGGTCCGCCAAGCCC |
| | | CGGGCCAGGGACTCGAATGGATGGGAGCCATCTACC |
| | | CTGGCAACGGGGACACCTCATACAACCCTAAGTTCA |
| | | AGGGCAGAGTGACCATGACTGCGGACAAGTCCACTA |
| | | GAACAGCGTACATGGAGCTGAGCAGCCTGCGGTCCG |
| | | AGGATACTGCCGTGTACTACTGCGCCCGCTCCTACTT |
| | | CTACGGAAGCTCGTCGTGGTACTTCGATGTCTGGGGA |
| | | CAGGGCACCACTGTGACTGTGTCCTCCGGTGGCGGAG |
| | | GCTCGGGCGGAGGCGGAAGCGGCGGCGGGGGATCGG |
| | | GAGGAGGAGGGTCCGAAATTGTGCTGACTCAGAGCC |
| | | CCGCCACCCTGAGCTTGTCCCCCGGGGAAAGGGCAA |
| | | CGCTGTCATGCCGCGCCTCGTCATCCGTGTCCTCCAT |
| | | GCATTGGTACCAGCAGAAGCCGGGACAGGCCCCTCG |
| | | GCCGCTGATCTTCGCCACCTCCAATCTCGCTTCCGGC |
| | | ATTCCGGCCCGGTTCTCGGGAAGCGGGTCGGGGACC |
| | | GACTATACCCTGACCATCTCTAGCCTTGAACCTGAGG |
| | | ACGCCGCGGTGTACTATTGTCAACAGTGGATCTTTAA |
| | | CCCCCCAACCTTCGGTGGAGGCACCAAAGTGGAGAT |
| | | TAAGACCACTACCCCAGCACCGAGGCCACCCACCCC |
| | | GGCTCCTACCATCGCCTCCCAGCCTCTGTCCCTGCGT |
| | | CCGGAGGCATGTAGACCCGCAGCTGGTGGGGCCGTG |
| | | CATACCCGGGGTCTTGACTTCGCCTGCGATATCTACA |
| | | TTTGGGCCCCTCTGGCTGGTACTTGCGGGGTCCTGCT |
| | | GCTTTCACTCGTGATCACTCTTTACTGTAAGCGCGGT |
| | | CGGAAGAAGCTGCTGTACATCTTTAAGCAACCCTTCA |
| | | TGAGGCCTGTGCAGACTACTCAAGAGGAGGACGGCT |
| | | GTTCATGCCGGTTCCCAGAGGAGGAGGAAGGCGGCT |
| | | GCGAACTGCGCGTGAAATTCAGCCGCAGCGCAGATG |
| | | CTCCAGCCTACCAGCAGGGGCAGAACCAGCTCTACA |
| | | ACGAACTCAATCTTGGTCGGAGAGAGGAGTACGACG |
| | | TGCTGGACAAGCGGAGAGGACGGGACCCAGAAATGG |
| | | GCGGGAAGCCGCGCAGAAAGAATCCCCAAGAGGGCC |
| | | TGTACAACGAGCTCCAAAAGGATAAGATGGCAGAAG |
| | | CCTATAGCGAGATTGGTATGAAAGGGGAACGCAGAA |
| | | GAGGCAAAGGCCACGACGGACTGTACCAGGGACTCA |
| | | GCACCGCCACCAAGGACACCTATGACGCTCTTCACAT |
| | | GCAGGCCCTGCCGCCTCGG |
| CD20-C2H1 | | |
| SEQ ID NO: | HCDR1 | NYWMH |
| 2064 | | |
| (Kabat) | | |
| SEQ ID NO: | HCDR2 | FITPTTGYPEYNQKFKD |
| 2065 (Kabat) | | |
| SEQ ID NO: | HCDR3 | RKVGKGVYYALDY |
| 2066 (Kabat) | | |
| SEQ ID NO: | HCDR1 | GYTFTNY |
| 2022 (Chothia) | | |
| SEQ ID NO: | HCDR2 | TPTTGY |
| 2067 (Chothia) | | |
| SEQ ID NO: | HCDR3 | RKVGKGVYYALDY |
| 2066 (Chothia) | | |
| SEQ ID NO: | HCDR1 | GYTFTNYW |
| 2068 (IMGT) | | |
| SEQ ID NO: | HCDR2 | ITPTTGYP |
| 2069 (IMGT) | | |
| SEQ ID NO: | HCDR3 | ARRKVGKGVYYALDY |
| 2070 (IMGT) | | |
| SEQ ID NO: | HCDR1 | GYTFTNYWMH |
| 2071 (Combined | | |
| Chothia and | | |
| Kabat) | | |
| SEQ ID NO: | HCDR2 | FITPTTGYPEYNQKFKD |
| 2065 (Combined | | |
| Chothia and | | |
| Kabat) | | |
| SEQ ID NO: | HCDR3 | RKVGKGVYYALDY |
| 2066 (Combined | | |
| Chothia and | | |
| Kabat) | | |
| SEQ ID NO: | VH | QVQLVQSGAEVKKPGASVKVSCKASGYTFTNYWMHW |
| 2072 | | VRQAPGQGLEWMGFITPTTGYPEYNQKFKDRVTMTAD |
| | | KSTSTAYMELSSLRSEDTAVYYCARRKVGKGVYYALD |
| | | YWGQGTTVTVSS |
| SEQ ID NO: | DNA VH | CAAGTGCAACTCGTCCAGTCCGGTGCAGAAGTCAAG |
| 2073 | | AAACCAGGCGCATCCGTGAAAGTCTCCTGCAAAGCC |
| | | TCCGGCTACACATTCACTAACTATTGGATGCATTGGG |
| | | TGCGCCAGGCCCCGGGACAGGGGCTGGAGTGGATGG |
| | | GGTTCATTACCCCTACCACCGGCTACCCTGAGTACAA |
| | | CCAGAAGTTCAAGGATAGGGTCACCATGACCGCTGA |
| | | CAAGTCCACCTCCACCGCGTACATGGAACTGTCATCG |
| | | CTCCGGTCCGAGGATACCGCGGTGTACTACTGCGCCC |
| | | GGAGAAAAGTCGGAAAGGGAGTGTATTACGCCTTGG |
| | | ACTACTGGGGACAGGGGACTACCGTGACCGTGTCGA |
| | | GC |
| SEQ ID NO: | LCDR1 | RASGNIHNYLA |
| 2074 (Kabat) | | |
| SEQ ID NO: | LCDR2 | NTKTLAD |
| 2075 (Kabat) | | |
| SEQ ID NO: | LCDR3 | QHFWSSPWT |
| 2076 (Kabat) | | |
| SEQ ID NO: | LCDR1 | SGNIHNY |
| 2077 (Chothia) | | |
| SEQ ID NO: | LCDR2 | NTK |
| 2078 (Chothia) | | |
| SEQ ID NO: | LCDR3 | FWSSPW |
| 2079 (Chothia) | | |
| SEQ ID NO: | LCDR1 | GNIHNY |
| 2080 (IMGT) | | |
| SEQ ID NO: | LCDR2 | NTK |
| 2078 (IMGT) | | |
| SEQ ID NO: | LCDR3 | QHFWSSPWT |
| 2076 (IMGT) | | |
| SEQ ID NO: | LCDR1 | RASGNIHNYLA |
| 2074 (Combined | | |
| Chothia and | | |
| Kabat | | |
| SEQ ID NO: | LCDR2 | NTKTLAD |
| 2075 (Combined | | |
| Chothia and | | |
| Kabat) | | |
| SEQ ID NO: | LCDR3 | QHFWSSPWT |
| 2076 (Combined | | |
| Chothia and | | |
| Kabat | | |
| SEQ ID NO: | VL | DIQMTQSPSSLSASVGDRVTITCRASGNIHNYLAWYQQ |
| 2081 | | KPGKVPKLLIYNTKTLADGVPSRFSGSGSGTDYTLTIS |
| | | SLQPEDVATYYCQHFWSSPWTFGGGTKVEIK |
| SEQ ID NO: | DNA VL | GACATCCAGATGACCCAGTCCCCGTCAAGCCTTAGCG |
| 2082 | | CCTCCGTGGGCGACCGCGTGACCATTACTTGTCGGGC |
| | | GTCGGGAAACATCCACAACTACCTCGCCTGGTACCAG |
| | | CAGAAGCCGGGAAAGGTCCCCAAGCTGCTGATCTAC |
| | | AATACCAAGACTCTGGCCGACGGAGTGCCTTCCCGCT |
| | | TTTCCGGTTCGGGAAGCGGGACTGACTACACCCTGAC |
| | | TATCTCCTCGCTGCAACCCGAAGATGTGGCTACGTAC |
| | | TACTGCCAGCACTTCTGGTCCTCTCCCTGGACCTTCG |
| | | GCGGTGGCACTAAGGTCGAGATTAAG |
| SEQ ID NO: | Linker | GGGGSGGGGSGGGGSGGGGS |
| 1010 | | |
| SEQ ID NO: | scFv (VH- | QVQLVQSGAEVKKPGASVKVSCKASGYTFTNYWMHW |
| 2083 | linker-VL) | VRQAPGQGLEWMGFITPTTGYPEYNQKFKDRVTMTAD |
| | | KSTSTAYMELSSLRSEDTAVYYCARRKVGKGVYYALD |
| | | YWGQGTTVTVSSGGGGSGGGGSGGGGSGGGGSDIQMT |
| | | QSPSSLSASVGDRVTITCRASGNIHNYLAWYQQKPGKV |
| | | PKLLIYNTKTLADGVPSRFSGSGSGTDYTLTISSLQPE |
| | | DVATYYCQHFWSSPWTFGGGTKVEIK |
| SEQ ID NO: | DNA scFv | CAAGTGCAACTCGTCCAGTCCGGTGCAGAAGTCAAG |
| 2084 | (VH-linker- | AAACCAGGCGCATCCGTGAAAGTCTCCTGCAAAGCC |
| | VL) | TCCGGCTACACATTCACTAACTATTGGATGCATTGGG |
| | | TGCGCCAGGCCCCGGGACAGGGGCTGGAGTGGATGG |
| | | GGTTCATTACCCCTACCACCGGCTACCCTGAGTACAA |
| | | CCAGAAGTTCAAGGATAGGGTCACCATGACCGCTGA |
| | | CAAGTCCACCTCCACCGCGTACATGGAACTGTCATCG |
| | | CTCCGGTCCGAGGATACCGCGGTGTACTACTGCGCCC |
| | | GGAGAAAAGTCGGAAAGGGAGTGTATTACGCCTTGG |
| | | ACTACTGGGGACAGGGGACTACCGTGACCGTGTCGA |
| | | GCGGTGGAGGCGGCTCCGGCGGAGGAGGAAGCGGG |
| | | GGAGGCGGTTCAGGGGGCGGAGGAAGCGACATCCAG |
| | | ATGACCCAGTCCCCGTCAAGCCTTAGCGCCTCCGTGG |
| | | GCGACCGCGTGACCATTACTTGTCGGGCGTCGGGAA |
| | | ACATCCACAACTACCTCGCCTGGTACCAGCAGAAGCC |
| | | GGGAAAGGTCCCCAAGCTGCTGATCTACAATACCAA |
| | | GACTCTGGCCGACGGAGTGCCTTCCCGCTTTTCCGGT |
| | | TCGGGAAGCGGGACTGACTACACCCTGACTATCTCCT |
| | | CGCTGCAACCCGAAGATGTGGCTACGTACTACTGCCA |
| | | GCACTTCTGGTCCTCTCCCTGGACCTTCGGCGGTGGC |
| | | ACTAAGGTCGAGATTAAG |
| SEQ ID NO: | Full CAR | MALPVTALLLPLALLLHAARPQVQLVQSGAEVKKPGAS |
| 2085 | amino acid | VKVSCKASGYTFTNYWMHWVRQAPGQGLEWMGFITP |
| | sequence | TTGYPEYNQKFKDRVTMTADKSTSTAYMELSSLRSEDT |
| | | AVYYCARRKVGKGVYYALDYWGQGTTVTVSSGGGGS |
| | | GGGGSGGGGSGGGGSDIQMTQSPSSLSASVGDRVTITC |
| | | RASGNIHNYLAWYQQKPGKVPKLLIYNTKTLADGVPSR |
| | | FSGSGSGTDYTLTISSLQPEDVATYYCQHFWSSPWTFGG |
| | | GTKVEIKTTTPAPRPPTPAPTIASQPLSLRPEACRPAAGG |
| | | AVHTRGLDFACDIYIWAPLAGTCGVLLLSLVITLYCKRG |
| | | RKKLLYIFKQPFMRPVQTTQEEDGCSCRFPEEEEGGCEL |
| | | RVKFSRSADAPAYQQGQNQLYNELNLGRREEYDVLDK |
| | | RRGRDPEMGGKPRRKNPQEGLYNELQKDKMAEAYSEI |
| | | GMKGERRRGKGHDGLYQGLSTATKDTYDALHMQALP |
| | | PR |
| SEQ ID NO: | Full CAR | ATGGCCCTCCCTGTCACCGCCCTGCTGCTTCCGCTGG |
| 2086 | nucleic acid | CTCTTCTGCTCCACGCCGCTCGGCCCCAAGTGCAACT |
| | sequence | CGTCCAGTCCGGTGCAGAAGTCAAGAAACCAGGCGC |
| | | ATCCGTGAAAGTCTCCTGCAAAGCCTCCGGCTACACA |
| | | TTCACTAACTATTGGATGCATTGGGTGCGCCAGGCCC |
| | | CGGGACAGGGGCTGGAGTGGATGGGGTTCATTACCC |
| | | CTACCACCGGCTACCCTGAGTACAACCAGAAGTTCAA |
| | | GGATAGGGTCACCATGACCGCTGACAAGTCCACCTCC |
| | | ACCGCGTACATGGAACTGTCATCGCTCCGGTCCGAGG |
| | | ATACCGCGGTGTACTACTGCGCCCGGAGAAAAGTCG |
| | | GAAAGGGAGTGTATTACGCCTTGGACTACTGGGGAC |
| | | AGGGGACTACCGTGACCGTGTCGAGCGGTGGAGGCG |
| | | GCTCCGGCGGAGGAGGAAGCGGGGGAGGCGGTTCAG |
| | | GGGGCGGAGGAAGCGACATCCAGATGACCCAGTCCC |
| | | CGTCAAGCCTTAGCGCCTCCGTGGGCGACCGCGTGAC |
| | | CATTACTTGTCGGGCGTCGGGAAACATCCACAACTAC |
| | | CTCGCCTGGTACCAGCAGAAGCCGGGAAAGGTCCCC |
| | | AAGCTGCTGATCTACAATACCAAGACTCTGGCCGACG |
| | | GAGTGCCTTCCCGCTTTTCCGGTTCGGGAAGCGGGAC |
| | | TGACTACACCCTGACTATCTCCTCGCTGCAACCCGAA |
| | | GATGTGGCTACGTACTACTGCCAGCACTTCTGGTCCT |
| | | CTCCCTGGACCTTCGGCGGTGGCACTAAGGTCGAGAT |
| | | TAAGACCACTACCCCAGCACCGAGGCCACCCACCCC |
| | | GGCTCCTACCATCGCCTCCCAGCCTCTGTCCCTGCGT |
| | | CCGGAGGCATGTAGACCCGCAGCTGGTGGGGCCGTG |
| | | CATACCCGGGGTCTTGACTTCGCCTGCGATATCTACA |
| | | TTTGGGCCCCTCTGGCTGGTACTTGCGGGGTCCTGCT |
| | | GCTTTCACTCGTGATCACTCTTTACTGTAAGCGCGGT |
| | | CGGAAGAAGCTGCTGTACATCTTTAAGCAACCCTTCA |
| | | TGAGGCCTGTGCAGACTACTCAAGAGGAGGACGGCT |
| | | GTTCATGCCGGTTCCCAGAGGAGGAGGAAGGCGGCT |
| | | GCGAACTGCGCGTGAAATTCAGCCGCAGCGCAGATG |
| | | CTCCAGCCTACCAGCAGGGGCAGAACCAGCTCTACA |
| | | ACGAACTCAATCTTGGTCGGAGAGAGGAGTACGACG |
| | | TGCTGGACAAGCGGAGAGGACGGGACCCAGAAATGG |
| | | GCGGGAAGCCGCGCAGAAAGAATCCCCAAGAGGGCC |
| | | TGTACAACGAGCTCCAAAAGGATAAGATGGCAGAAG |
| | | CCTATAGCGAGATTGGTATGAAAGGGGAACGCAGAA |
| | | GAGGCAAAGGCCACGACGGACTGTACCAGGGACTCA |
| | | GCACCGCCACCAAGGACACCTATGACGCTCTTCACAT |
| | | GCAGGCCCTGCCGCCTCGG |
| CD20-C2H2 | | |
| SEQ ID NO: | HCDR1 | NYWMH |
| 2064 (Kabat) | | |
| SEQ ID NO: | HCDR2 | FITPTTGYPEYNQKFKD |
| 2065 (Kabat) | | |
| SEQ ID NO: | HCDR3 | RKVGKGVYYALDY |
| 2066 (Kabat) | | |
| SEQ ID NO: | HCDR1 | GYTFTNY |
| 2022 (Chothia) | | |
| SEQ ID NO: | HCDR2 | TPTTGY |
| 2067 (Chothia) | | |
| SEQ ID NO: | HCDR3 | RKVGKGVYYALDY |
| 2066 (Chothia) | | |
| SEQ ID NO: | HCDR1 | GYTFTNYW |
| 2068 (IMGT) | | |
| SEQ ID NO: | HCDR2 | ITPTTGYP |
| 2069 (IMGT) | | |
| SEQ ID NO: | HCDR3 | ARRKVGKGVYYALDY |
| 2070 (IMGT) | | |
| SEQ ID NO: | HCDR1 | GYTFTNYWMH |
| 2071 (Combined | | |
| Chothia and | | |
| Kabat) | | |
| SEQ ID NO: | HCDR2 | FITPTTGYPEYNQKFKD |
| 2065 (Combined | | |
| Chothia and | | |
| Kabat) | | |
| SEQ ID NO: | HCDR3 | RKVGKGVYYALDY |
| 2066 (Combined | | |
| Chothia and | | |
| Kabat) | | |
| SEQ ID NO: | VH | QVQLVQSGAEVKKPGSSVKVSCKASGYTFTNYWMHW |
| 2087 | | VRQAPGQGLEWMGFITPTTGYPEYNQKFKDRVTITADK |
| | | STSTAYMELSSLRSEDTAVYYCARRKVGKGVYYALDY |
| | | WGQGTTVTVSS |
| SEQ ID NO: | DNA VH | CAAGTCCAACTCGTCCAATCAGGAGCAGAAGTCAAG |
| 2088 | | AAGCCCGGAAGCTCTGTCAAAGTGTCCTGCAAGGCCT |
| | | CCGGTTACACCTTCACCAACTATTGGATGCACTGGGT |
| | | CAGACAGGCCCCGGGACAGGGCTTGGAATGGATGGG |
| | | TTTCATCACTCCAACCACCGGTTACCCGGAGTACAAC |
| | | CAGAAGTTTAAGGACCGCGTGACCATTACTGCCGAC |
| | | AAGTCCACGAGCACCGCTTACATGGAACTTAGCAGC |
| | | CTGCGGTCCGAGGACACTGCCGTGTATTACTGCGCGC |
| | | GGAGGAAGGTCGGAAAGGGAGTGTACTACGCACTGG |
| | | ACTACTGGGGCCAGGGAACCACCGTGACTGTGTCCTC |
| | | C |
| SEQ ID NO: | LCDR1 | RASGNIHNYLA |
| 2074 (Kabat) | | |
| SEQ ID NO: | LCDR2 | NTKTLAD |
| 2075 (Kabat) | | |
| SEQ ID NO: | LCDR3 | QHFWSSPWT |
| 2076 (Kabat) | | |
| SEQ ID NO: | LCDR1 | SGNIHNY |
| 2077 (Chothia) | | |
| SEQ ID NO: | LCDR2 | NTK |
| 2078 (Chothia) | | |
| SEQ ID NO: | LCDR3 | FWSSPW |
| 2079 (Chothia) | | |
| SEQ ID NO: | LCDR1 | GNIHNY |
| 2080 (IMGT) | | |
| SEQ ID NO: | LCDR 2 | NTK |
| 2078 (IMGT) | | |
| SEQ ID NO: | LCDR3 | QHFWSSPWT |
| 2076 (IMGT) | | |
| SEQ ID NO: | LCDR1 | RASGNIHNYLA |
| 2074 (Combined | | |
| Chothia and | | |
| Kabat) | | |
| SEQ ID NO: | LCDR2 | NTKTLAD |
| 2075(Combined | | |
| Chothia and | | |
| Kabat) | | |
| SEQ ID NO: | LCDR3 | QHFWSSPWT |
| 2076 (Combined | | |
| Chothia and | | |
| Kabat) | | |
| SEQ ID NO: | VL | DIQMTQSPSSLSASVGDRVTITCRASGNIHNYLAWYQQ |
| 2081 | | KPGKVPKLLIYNTKTLADGVPSRFSGSGSGTDYTLTIS |
| | | SLQPEDVATYYCQHFWSSPWTFGGGTKVEIK |
| SEQ ID NO: | DNA VL | GATATTCAGATGACCCAGTCCCCTTCATCCCTGAGCG |
| 2089 | | CCTCAGTGGGCGATAGAGTGACCATCACTTGTCGCGC |
| | | CTCGGGCAATATCCACAACTACCTCGCCTGGTACCAG |
| | | CAGAAGCCGGGAAAAGTGCCTAAGCTGCTGATCTAC |
| | | AACACTAAGACCCTGGCGGATGGAGTGCCCAGCCGG |
| | | TTCTCCGGCTCCGGCAGCGGCACAGACTACACCCTCA |
| | | CCATCTCCTCGCTGCAACCAGAGGACGTGGCTACCTA |
| | | CTACTGCCAGCATTTCTGGTCGTCCCCCTGGACTTTCG |
| | | GAGGGGGGACCAAAGTGGAGATTAAG |
| SEQ ID NO: | Linker | GGGGSGGGGSGGGGSGGGGS |
| 1010 | | |
| SEQ ID NO: | scFv (VH- | QVQLVQSGAEVKKPGSSVKVSCKASGYTFTNYWMHW |
| 2090 | linker-VL) | VRQAPGQGLEWMGFITPTTGYPEYNQKFKDRVTITADK |
| | | STSTAYMELSSLRSEDTAVYYCARRKVGKGVYYALDY |
| | | WGQGTTVTVSSGGGGSGGGGSGGGGSGGGGSDIQMTQ |
| | | SPSSLSASVGDRVTITCRASGNIHNYLAWYQQKPGKVP |
| | | KLLIYNTKTLADGVPSRFSGSGSGTDYTLTISSLQPED |
| | | VATYYCQHFWSSPWTFGGGTKVEIK |
| SEQ ID NO: | DNA scFv | CAAGTCCAACTCGTCCAATCAGGAGCAGAAGTCAAG |
| 2091 | (VH-linker- | AAGCCCGGAAGCTCTGTCAAAGTGTCCTGCAAGGCCT |
| | VL) | CCGGTTACACCTTCACCAACTATTGGATGCACTGGGT |
| | | CAGACAGGCCCCGGGACAGGGCTTGGAATGGATGGG |
| | | TTTCATCACTCCAACCACCGGTTACCCGGAGTACAAC |
| | | CAGAAGTTTAAGGACCGCGTGACCATTACTGCCGAC |
| | | AAGTCCACGAGCACCGCTTACATGGAACTTAGCAGC |
| | | CTGCGGTCCGAGGACACTGCCGTGTATTACTGCGCGC |
| | | GGAGGAAGGTCGGAAAGGGAGTGTACTACGCACTGG |
| | | ACTACTGGGGCCAGGGAACCACCGTGACTGTGTCCTC |
| | | CGGTGGCGGAGGGTCGGGAGGGGGGGGCTCGGGAG |
| | | GAGGAGGGTCCGGGGGCGGTGGCTCAGATATTCAGA |
| | | TGACCCAGTCCCCTTCATCCCTGAGCGCCTCAGTGGG |
| | | CGATAGAGTGACCATCACTTGTCGCGCCTCGGGCAAT |
| | | ATCCACAACTACCTCGCCTGGTACCAGCAGAAGCCG |
| | | GGAAAAGTGCCTAAGCTGCTGATCTACAACACTAAG |
| | | ACCCTGGCGGATGGAGTGCCCAGCCGGTTCTCCGGCT |
| | | CCGGCAGCGGCACAGACTACACCCTCACCATCTCCTC |
| | | GCTGCAACCAGAGGACGTGGCTACCTACTACTGCCA |
| | | GCATTTCTGGTCGTCCCCCTGGACTTTCGGAGGGGGG |
| | | ACCAAAGTGGAGATTAAG |
| SEQ ID NO: | Full CAR | MALPVTALLLPLALLLHAARPQVQLVQSGAEVKKPGSS |
| 2092 | amino acid | VKVSCKASGYTFTNYWMHWVRQAPGQGLEWMGFITP |
| | sequence | TTGYPEYNQKFKDRVTITADKSTSTAYMELSSLRSEDTA |
| | | VYYCARRKVGKGVYYALDYWGQGTTVTVSSGGGGSG |
| | | GGGSGGGGSGGGGSDIQMTQSPSSLSASVGDRVTITCR |
| | | ASGNIHNYLAWYQQKPGKVPKLLIYNTKTLADGVPSRF |
| | | SGSGSGTDYTLTISSLQPEDVATYYCQHFWSSPWTFGG |
| | | GTKVEIKTTTPAPRPPTPAPTIASQPLSLRPEACRPAAGG |
| | | AVHTRGLDFACDIYIWAPLAGTCGVLLLSLVITLYCKRG |
| | | RKKLLYIFKQPFMRPVQTTQEEDGCSCRFPEEEEGGCEL |
| | | RVKFSRSADAPAYQQGQNQLYNELNLGRREEYDVLDK |
| | | RRGRDPEMGGKPRRKNPQEGLYNELQKDKMAEAYSEI |
| | | GMKGERRRGKGHDGLYQGLSTATKDTYDALHMQALP |
| | | PR |
| SEQ ID NO: | Full CAR | ATGGCCCTCCCTGTCACCGCCCTGCTGCTTCCGCTGG |
| 2093 | nucleic acid | CTCTTCTGCTCCACGCCGCTCGGCCCCAAGTCCAACT |
| | sequence | CGTCCAATCAGGAGCAGAAGTCAAGAAGCCCGGAAG |
| | | CTCTGTCAAAGTGTCCTGCAAGGCCTCCGGTTACACC |
| | | TTCACCAACTATTGGATGCACTGGGTCAGACAGGCCC |
| | | CGGGACAGGGCTTGGAATGGATGGGTTTCATCACTCC |
| | | AACCACCGGTTACCCGGAGTACAACCAGAAGTTTAA |
| | | GGACCGCGTGACCATTACTGCCGACAAGTCCACGAG |
| | | CACCGCTTACATGGAACTTAGCAGCCTGCGGTCCGAG |
| | | GACACTGCCGTGTATTACTGCGCGCGGAGGAAGGTC |
| | | GGAAAGGGAGTGTACTACGCACTGGACTACTGGGGC |
| | | CAGGGAACCACCGTGACTGTGTCCTCCGGTGGCGGA |
| | | GGGTCGGGAGGGGGGGGCTCGGGAGGAGGAGGGTC |
| | | CGGGGGCGGTGGCTCAGATATTCAGATGACCCAGTC |
| | | CCCTTCATCCCTGAGCGCCTCAGTGGGCGATAGAGTG |
| | | ACCATCACTTGTCGCGCCTCGGGCAATATCCACAACT |
| | | ACCTCGCCTGGTACCAGCAGAAGCCGGGAAAAGTGC |
| | | CTAAGCTGCTGATCTACAACACTAAGACCCTGGCGGA |
| | | TGGAGTGCCCAGCCGGTTCTCCGGCTCCGGCAGCGGC |
| | | ACAGACTACACCCTCACCATCTCCTCGCTGCAACCAG |
| | | AGGACGTGGCTACCTACTACTGCCAGCATTTCTGGTC |
| | | GTCCCCCTGGACTTTCGGAGGGGGGACCAAAGTGGA |
| | | GATTAAGACCACTACCCCAGCACCGAGGCCACCCAC |
| | | CCCGGCTCCTACCATCGCCTCCCAGCCTCTGTCCCTG |
| | | CGTCCGGAGGCATGTAGACCCGCAGCTGGTGGGGCC |
| | | GTGCATACCCGGGGTCTTGACTTCGCCTGCGATATCT |
| | | ACATTTGGGCCCCTCTGGCTGGTACTTGCGGGGTCCT |
| | | GCTGCTTTCACTCGTGATCACTCTTTACTGTAAGCGC |
| | | GGTCGGAAGAAGCTGCTGTACATCTTTAAGCAACCCT |
| | | TCATGAGGCCTGTGCAGACTACTCAAGAGGAGGACG |
| | | GCTGTTCATGCCGGTTCCCAGAGGAGGAGGAAGGCG |
| | | GCTGCGAACTGCGCGTGAAATTCAGCCGCAGCGCAG |
| | | ATGCTCCAGCCTACCAGCAGGGGCAGAACCAGCTCT |
| | | ACAACGAACTCAATCTTGGTCGGAGAGAGGAGTACG |
| | | ACGTGCTGGACAAGCGGAGAGGACGGGACCCAGAAA |
| | | TGGGCGGGAAGCCGCGCAGAAAGAATCCCCAAGAGG |
| | | GCCTGTACAACGAGCTCCAAAAGGATAAGATGGCAG |
| | | AAGCCTATAGCGAGATTGGTATGAAAGGGGAACGCA |
| | | GAAGAGGCAAAGGCCACGACGGACTGTACCAGGGAC |
| | | TCAGCACCGCCACCAAGGACACCTATGACGCTCTTCA |
| | | CATGCAGGCCCTGCCGCCTCGG |
| CD20-C2H3 | | |
| SEQ ID NO: | HCDR1 | NYWMH |
| 2064 (Kabat) | | |
| SEQ ID NO: | HCDR2 | FITPTTGYPEYNQKFKD |
| 2065 (Kabat) | | |
| SEQ ID NO: | HCDR3 | RKVGKGVYYALDY |
| 2066 (Kabat) | | |
| SEQ ID NO: | HCDR1 | GYTFTNY |
| 2022 (Chothia) | | |
| SEQ ID NO: | HCDR2 | TPTTGY |
| 2067 (Chothia) | | |
| SEQ ID NO: | HCDR3 | RKVGKGVYYALDY |
| 2066 (Chothia) | | |
| SEQ ID NO: | HCDR1 | GYTFTNYW |
| 2068 (IMGT) | | |
| SEQ ID NO: | HCDR2 | ITPTTGYP |
| 2069 (IMGT) | | |
| SEQ ID NO: | HCDR3 | ARRKVGKGVYYALDY |
| 2070 (IMGT) | | |
| SEQ ID NO: | HCDR1 | GYTFTNYWMH |
| 2071 (Combined | | |
| Chothia and | | |
| Kabat | | |
| SEQ ID NO: | HCDR2 | FITPTTGYPEYNQKFKD |
| 2065 (Combined | | |
| Chothia and | | |
| Kabat) | | |
| SEQ ID NO: | HCDR3 | RKVGKGVYYALDY |
| 2066 (Combined | | |
| Chothia and | | |
| Kabat) | | |
| SEQ ID NO: | VH | QVQLVQSGAEVKKPGASVKVSCKASGYTFTNYWMHW |
| 2072 | | VRQAPGQGLEWMGFITPTTGYPEYNQKFKDRVTMTAD |
| | | KSTSTAYMELSSLRSEDTAVYYCARRKVGKGVYYALD |
| | | YWGQGTTVTVSS |
| SEQ ID NO: | DNA VH | CAAGTCCAACTCGTCCAGTCCGGTGCAGAAGTCAAG |
| 2094 | | AAACCCGGAGCTTCCGTGAAAGTGTCCTGCAAAGCCT |
| | | CCGGTTACACCTTTACGAACTACTGGATGCATTGGGT |
| | | GCGCCAGGCCCCGGGACAGGGGCTGGAATGGATGGG |
| | | CTTCATTACCCCCACCACCGGATACCCCGAGTACAAT |
| | | CAGAAGTTCAAGGACCGGGTCACCATGACCGCCGAC |
| | | AAGTCAACCTCTACTGCTTACATGGAGCTGTCCAGCC |
| | | TGCGGTCGGAAGATACCGCCGTGTATTACTGCGCGAG |
| | | AAGGAAAGTCGGAAAGGGAGTGTACTATGCCCTGGA |
| | | CTACTGGGGACAGGGGACCACTGTGACTGTGTCAAG |
| | | C |
| SEQ ID NO: | LCDR1 | RASGNIHNYLA |
| 2074 (Kabat) | | |
| SEQ ID NO: | LCDR2 | NTKTLAD |
| 2075 (Kabat) | | |
| SEQ ID NO: | LCDR3 | QHFWSSPWT |
| 2076 (Kabat) | | |
| SEQ ID NO: | LCDR1 | SGNIHNY |
| 2077 (Chothia) | | |
| SEQ ID NO: | LCDR2 | NTK |
| 2078 (Chothia) | | |
| SEQ ID NO: | LCDR3 | FWSSPW |
| 2079 (Chothia) | | |
| SEQ ID NO: | LCDR1 | GNIHNY |
| 2080 (IMGT) | | |
| SEQ ID NO: | LCDR2 | NTK |
| 2078 (IMGT) | | |
| SEQ ID NO: | LCDR3 | QHFWSSPWT |
| 2076 (IMGT) | | |
| SEQ ID NO: | LCDR1 | RASGNIHNYLA |
| 2074 (Combined | | |
| Chothia and | | |
| Kabat) | | |
| SEQ ID NO: | LCDR2 | NTKTLAD |
| 2075 (Combined | | |
| Chothia and | | |
| Kabat) | | |
| SEQ ID NO: | LCDR3 | QHFWSSPWT |
| 2076 (Combined | | |
| Chothia and | | |
| Kabat) | | |
| SEQ ID NO: | VL | AIRMTQSPFSLSASVGDRVTITCRASGNIHNYLAWYQQ |
| 2095 | | KPAKAPKLFIYNTKTLADGVPSRFSGSGSGTDYTLTIS |
| | | SLQPEDFATYYCQHFWSSPWTFGGGTKVEIK |
| SEQ ID NO: | DNA VL | GCGATCCGCATGACCCAGAGCCCGTTCTCCCTGTCCG |
| 2096 | | CGTCCGTGGGGGACCGCGTGACTATCACGTGTCGGGC |
| | | CTCCGGGAACATCCACAACTACCTCGCATGGTACCAG |
| | | CAGAAGCCGGCCAAGGCCCCTAAGTTGTTCATCTACA |
| | | ACACCAAGACTCTTGCCGACGGAGTGCCGTCCCGGTT |
| | | TAGCGGAAGCGGTTCCGGCACCGACTACACCCTGACT |
| | | ATCTCGAGCCTGCAACCAGAAGATTTCGCCACTTACT |
| | | ACTGCCAGCACTTCTGGTCGTCCCCTTGGACATTCGG |
| | | CGGCGGCACCAAGGTCGAGATTAAG |
| SEQ ID NO: | Linker | GGGGSGGGGSGGGGSGGGGS |
| 1010 | | |
| SEQ ID NO: | scFv (VH- | QVQLVQSGAEVKKPGASVKVSCKASGYTFTNYWMHW |
| 2097 | linker-VL) | VRQAPGQGLEWMGFITPTTGYPEYNQKFKDRVTMTAD |
| | | KSTSTAYMELSSLRSEDTAVYYCARRKVGKGVYYALD |
| | | YWGQGTTVTVSSGGGGSGGGGSGGGGSGGGGSAIRMT |
| | | QSPFSLSASVGDRVTITCRASGNIHNYLAWYQQKPAKA |
| | | PKLFIYNTKTLADGVPSRFSGSGSGTDYTLTISSLQPE |
| | | DFATYYCQHFWSSPWTFGGGTKVEIK |
| SEQ ID NO: | DNA scFv | CAAGTCCAACTCGTCCAGTCCGGTGCAGAAGTCAAG |
| 2098 | (VH-linker- | AAACCCGGAGCTTCCGTGAAAGTGTCCTGCAAAGCCT |
| | VL) | CCGGTTACACCTTTACGAACTACTGGATGCATTGGGT |
| | | GCGCCAGGCCCCGGGACAGGGGCTGGAATGGATGGG |
| | | CTTCATTACCCCCACCACCGGATACCCCGAGTACAAT |
| | | CAGAAGTTCAAGGACCGGGTCACCATGACCGCCGAC |
| | | AAGTCAACCTCTACTGCTTACATGGAGCTGTCCAGCC |
| | | TGCGGTCGGAAGATACCGCCGTGTATTACTGCGCGAG |
| | | AAGGAAAGTCGGAAAGGGAGTGTACTATGCCCTGGA |
| | | CTACTGGGGACAGGGGACCACTGTGACTGTGTCAAG |
| | | CGGAGGCGGAGGCTCGGGGGGCGGAGGTTCGGGCGG |
| | | AGGAGGATCAGGGGGCGGCGGTTCCGCGATCCGCAT |
| | | GACCCAGAGCCCGTTCTCCCTGTCCGCGTCCGTGGGG |
| | | GACCGCGTGACTATCACGTGTCGGGCCTCCGGGAAC |
| | | ATCCACAACTACCTCGCATGGTACCAGCAGAAGCCG |
| | | GCCAAGGCCCCTAAGTTGTTCATCTACAACACCAAGA |
| | | CTCTTGCCGACGGAGTGCCGTCCCGGTTTAGCGGAAG |
| | | CGGTTCCGGCACCGACTACACCCTGACTATCTCGAGC |
| | | CTGCAACCAGAAGATTTCGCCACTTACTACTGCCAGC |
| | | ACTTCTGGTCGTCCCCTTGGACATTCGGCGGCGGCAC |
| | | CAAGGTCGAGATTAAG |
| SEQ ID NO: | Full CAR | MALPVTALLLPLALLLHAARPQVQLVQSGAEVKKPGAS |
| 2099 | amino acid | VKVSCKASGYTFTNYWMHWVRQAPGQGLEWMGFITP |
| | sequence | TTGYPEYNQKFKDRVTMTADKSTSTAYMELSSLRSEDT |
| | | AVYYCARRKVGKGVYYALDYWGQGTTVTVSSGGGGS |
| | | GGGGSGGGGSGGGGSAIRMTQSPFSLSASVGDRVTITC |
| | | RASGNIHNYLAWYQQKPAKAPKLFIYNTKTLADGVPSR |
| | | FSGSGSGTDYTLTISSLQPEDFATYYCQHFWSSPWTFGG |
| | | GTKVEIKTTTPAPRPPTPAPTIASQPLSLRPEACRPAAGG |
| | | AVHTRGLDFACDIYIWAPLAGTCGVLLLSLVITLYCKRG |
| | | RKKLLYIFKQPFMRPVQTTQEEDGCSCRFPEEEEGGCEL |
| | | RVKFSRSADAPAYQQGQNQLYNELNLGRREEYDVLDK |
| | | RRGRDPEMGGKPRRKNPQEGLYNELQKDKMAEAYSEI |
| | | GMKGERRRGKGHDGLYQGLSTATKDTYDALHMQALP |
| | | PR |
| SEQ ID NO: | Full CAR | ATGGCCCTCCCTGTCACCGCCCTGCTGCTTCCGCTGG |
| 2100 | nucleic acid | CTCTTCTGCTCCACGCCGCTCGGCCCCAAGTCCAACT |
| | sequence | CGTCCAGTCCGGTGCAGAAGTCAAGAAACCCGGAGC |
| | | TTCCGTGAAAGTGTCCTGCAAAGCCTCCGGTTACACC |
| | | TTTACGAACTACTGGATGCATTGGGTGCGCCAGGCCC |
| | | CGGGACAGGGGCTGGAATGGATGGGCTTCATTACCC |
| | | CCACCACCGGATACCCCGAGTACAATCAGAAGTTCA |
| | | AGGACCGGGTCACCATGACCGCCGACAAGTCAACCT |
| | | CTACTGCTTACATGGAGCTGTCCAGCCTGCGGTCGGA |
| | | AGATACCGCCGTGTATTACTGCGCGAGAAGGAAAGT |
| | | CGGAAAGGGAGTGTACTATGCCCTGGACTACTGGGG |
| | | ACAGGGGACCACTGTGACTGTGTCAAGCGGAGGCGG |
| | | AGGCTCGGGGGGCGGAGGTTCGGGCGGAGGAGGATC |
| | | AGGGGGCGGCGGTTCCGCGATCCGCATGACCCAGAG |
| | | CCCGTTCTCCCTGTCCGCGTCCGTGGGGGACCGCGTG |
| | | ACTATCACGTGTCGGGCCTCCGGGAACATCCACAACT |
| | | ACCTCGCATGGTACCAGCAGAAGCCGGCCAAGGCCC |
| | | CTAAGTIGTTCATCTACAACACCAAGACTCTTGCCGA |
| | | CGGAGTGCCGTCCCGGTTTAGCGGAAGCGGTTCCGGC |
| | | ACCGACTACACCCTGACTATCTCGAGCCTGCAACCAG |
| | | AAGATTTCGCCACTTACTACTGCCAGCACTTCTGGTC |
| | | GTCCCCTTGGACATTCGGCGGCGGCACCAAGGTCGA |
| | | GATTAAGACCACTACCCCAGCACCGAGGCCACCCAC |
| | | CCCGGCTCCTACCATCGCCTCCCAGCCTCTGTCCCTG |
| | | CGTCCGGAGGCATGTAGACCCGCAGCTGGTGGGGCC |
| | | GTGCATACCCGGGGTCTTGACTTCGCCTGCGATATCT |
| | | ACATTTGGGCCCCTCTGGCTGGTACTTGCGGGGTCCT |
| | | GCTGCTTTCACTCGTGATCACTCTTTACTGTAAGCGC |
| | | GGTCGGAAGAAGCTGCTGTACATCTTTAAGCAACCCT |
| | | TCATGAGGCCTGTGCAGACTACTCAAGAGGAGGACG |
| | | GCTGTTCATGCCGGTTCCCAGAGGAGGAGGAAGGCG |
| | | GCTGCGAACTGCGCGTGAAATTCAGCCGCAGCGCAG |
| | | ATGCTCCAGCCTACCAGCAGGGGCAGAACCAGCTCT |
| | | ACAACGAACTCAATCTTGGTCGGAGAGAGGAGTACG |
| | | ACGTGCTGGACAAGCGGAGAGGACGGGACCCAGAAA |
| | | TGGGCGGGAAGCCGCGCAGAAAGAATCCCCAAGAGG |
| | | GCCTGTACAACGAGCTCCAAAAGGATAAGATGGCAG |
| | | AAGCCTATAGCGAGATTGGTATGAAAGGGGAACGCA |
| | | GAAGAGGCAAAGGCCACGACGGACTGTACCAGGGAC |
| | | TCAGCACCGCCACCAAGGACACCTATGACGCTCTTCA |
| | | CATGCAGGCCCTGCCGCCTCGG |
| CD20-C2H4 | | |
| SEQ ID NO: | HCDR1 | NYWMH |
| 2064 (Kabat) | | |
| SEQ ID NO: | HCDR2 | FITPTTGYPEYNQKFKD |
| 2065 (Kabat) | | |
| SEQ ID NO: | HCDR3 | RKVGKGVYYALDY |
| 2066 (Kabat) | | |
| SEQ ID NO: | HCDR1 | GYTFTNY |
| 2022 (Chothia) | | |
| SEQ ID NO: | HCDR2 | TPTTGY |
| 2067 (Chothia) | | |
| SEQ ID NO: | HCDR3 | RKVGKGVYYALDY |
| 2066 (Chothia) | | |
| SEQ ID NO: | HCDR1 | GYTFTNYW |
| 2068 (IMGT) | | |
| SEQ ID NO: | HCDR2 | ITPTTGYP |
| 2069 (IMGT) | | |
| SEQ ID NO: | HCDR3 | ARRKVGKGVYYALDY |
| 2070 (IMGT) | | |
| SEQ ID NO: | HCDR1 | GYTFTNYWMH |
| 2071 (Combined | | |
| Chothia and | | |
| Kabat) | | |
| SEQ ID NO: | HCDR2 | FITPTTGYPEYNQKFKD |
| 2065 (Combined | | |
| Chothia and | | |
| Kabat) | | |
| SEQ ID NO: | HCDR3 | RKVGKGVYYALDY |
| 2066 (Combined | | |
| Chothia and | | |
| Kabat) | | |
| SEQ ID NO: | VH | QVQLVQSGAEVKKPGSSVKVSCKASGYTFTNYWMHW |
| 2087 | | VRQAPGQGLEWMGFITPTTGYPEYNQKFKDRVTITADK |
| | | STSTAYMELSSLRSEDTAVYYCARRKVGKGVYYALDY |
| | | WGQGTTVTVSS |
| SEQ ID NO: | DNA VH | CAAGTCCAACTCGTCCAAAGCGGTGCAGAAGTCAAG |
| 2101 | | AAGCCCGGTTCCTCCGTGAAAGTGTCCTGCAAAGCCT |
| | | CGGGCTACACCTTCACTAATTACTGGATGCATTGGGT |
| | | CCGCCAGGCGCCCGGACAGGGATTGGAATGGATGGG |
| | | GTTCATCACGCCGACCACCGGATACCCGGAGTACAA |
| | | CCAGAAGTTCAAGGACAGAGTGACCATTACCGCCGA |
| | | TAAGTCCACCTCCACCGCTTACATGGAGCTCTCCTCA |
| | | CTGCGGTCCGAAGATACAGCCGTGTACTATTGTGCTC |
| | | GCCGGAAAGTCGGAAAGGGAGTGTACTACGCCCTGG |
| | | ACTATTGGGGCCAGGGCACCACCGTGACCGTGTCCTC |
| | | G |
| SEQ ID NO: | LCDR1 | RASGNIHNYLA |
| 2074 (Kabat) | | |
| SEQ ID NO: | LCDR2 | NTKTLAD |
| 2075 (Kabat) | | |
| SEQ ID NO: | LCDR3 | QHFWSSPWT |
| 2076 (Kabat) | | |
| SEQ ID NO: | LCDR1 | SGNIHNY |
| 2077 (Chothia) | | |
| SEQ ID NO: | LCDR2 | NTK |
| 2078 (Chothia) | | |
| SEQ ID NO: | LCDR3 | FWSSPW |
| 2079 (Chothia) | | |
| SEQ ID NO: | LCDR1 | GNIHNY |
| 2080 (IMGT) | | |
| SEQ ID NO: | LCDR2 | NTK |
| 2078 (IMGT) | | |
| SEQ ID NO: | LCDR3 | QHFWSSPWT |
| 2076 (IMGT) | | |
| SEQ ID NO: | LCDR1 | RASGNIHNYLA |
| 2074 (Combined | | |
| Chothia and | | |
| Kabat) | | |
| SEQ ID NO: | LCDR2 | NTKTLAD |
| 2075 (Combined | | |
| Chothia and | | |
| Kabat) | | |
| SEQ ID NO: | LCDR3 | QHFWSSPWT |
| 2076 (Combined | | |
| Chothia and | | |
| Kabat) | | |
| SEQ ID NO: | VL | AIRMTQSPFSLSASVGDRVTITCRASGNIHNYLAWYQQ |
| 2095 | | KPAKAPKLFIYNTKTLADGVPSRFSGSGSGTDYTLTISSL |
| | | QPEDFATYYCQHFWSSPWTFGGGTKVEIK |
| SEQ ID NO: | DNA VL | GCCATTAGGATGACTCAGTCCCCTTTCTCCCTCTCCGC |
| 2102 | | GAGCGTGGGCGACCGCGTGACGATCACTTGCCGGGC |
| | | CTCGGGGAACATTCACAACTACCTGGCCTGGTACCAG |
| | | CAGAAGCCGGCCAAGGCCCCTAAGCTGTTCATCTACA |
| | | ACACCAAGACCCTTGCGGACGGAGTGCCATCGAGAT |
| | | TTTCCGGCTCGGGCTCTGGGACCGATTACACTCTGAC |
| | | TATCTCAAGCCTGCAACCTGAGGACTTCGCCACTTAC |
| | | TACTGCCAGCACTTCTGGAGCAGCCCCTGGACTTTCG |
| | | GTGGCGGGACCAAGGTCGAAATCAAG |
| SEQ ID NO: | Linker | GGGGSGGGGSGGGGSGGGGS |
| 1010 | | |
| SEQ ID NO: | scFv (VH- | QVQLVQSGAEVKKPGSSVKVSCKASGYTFTNYWMHW |
| 2103 | linker-VL) | VRQAPGQGLEWMGFITPTTGYPEYNQKFKDRVTITADK |
| | | STSTAYMELSSLRSEDTAVYYCARRKVGKGVYYALDY |
| | | WGQGTTVTVSSGGGGSGGGGSGGGGSGGGGSAIRMTQ |
| | | SPFSLSASVGDRVTITCRASGNIHNYLAWYQQKPAKAP |
| | | KLFIYNTKTLADGVPSRFSGSGSGTDYTLTISSLQPEDFA |
| | | TYYCQHFWSSPWTFGGGTKVEIK |
| SEQ ID NO: | DNA scFv | CAAGTCCAACTCGTCCAAAGCGGTGCAGAAGTCAAG |
| 2104 | (VH-linker- | AAGCCCGGTTCCTCCGTGAAAGTGTCCTGCAAAGCCT |
| | VL) | CGGGCTACACCTTCACTAATTACTGGATGCATTGGGT |
| | | CCGCCAGGCGCCCGGACAGGGATTGGAATGGATGGG |
| | | GTTCATCACGCCGACCACCGGATACCCGGAGTACAA |
| | | CCAGAAGTTCAAGGACAGAGTGACCATTACCGCCGA |
| | | TAAGTCCACCTCCACCGCTTACATGGAGCTCTCCTCA |
| | | CTGCGGTCCGAAGATACAGCCGTGTACTATTGTGCTC |
| | | GCCGGAAAGTCGGAAAGGGAGTGTACTACGCCCTGG |
| | | ACTATTGGGGCCAGGGCACCACCGTGACCGTGTCCTC |
| | | GGGAGGAGGGGGTTCGGGCGGAGGCGGCTCCGGTGG |
| | | AGGCGGAAGCGGAGGGGGCGGATCAGCCATTAGGAT |
| | | GACTCAGTCCCCTTTCTCCCTCTCCGCGAGCGTGGGC |
| | | GACCGCGTGACGATCACTTGCCGGGCCTCGGGGAAC |
| | | ATTCACAACTACCTGGCCTGGTACCAGCAGAAGCCG |
| | | GCCAAGGCCCCTAAGCTGTTCATCTACAACACCAAGA |
| | | CCCTTGCGGACGGAGTGCCATCGAGATTTTCCGGCTC |
| | | GGGCTCTGGGACCGATTACACTCTGACTATCTCAAGC |
| | | CTGCAACCTGAGGACTTCGCCACTTACTACTGCCAGC |
| | | ACTTCTGGAGCAGCCCCTGGACTTTCGGTGGCGGGAC |
| | | CAAGGTCGAAATCAAG |
| SEQ ID NO: | Full CAR | MALPVTALLLPLALLLHAARPQVQLVQSGAEVKKPGSS |
| 2105 | amino acid | VKVSCKASGYTFTNYWMHWVRQAPGQGLEWMGFITP |
| | sequence | TTGYPEYNQKFKDRVTITADKSTSTAYMELSSLRSEDTA |
| | | VYYCARRKVGKGVYYALDYWGQGTTVTVSSGGGGSG |
| | | GGGSGGGGSGGGGSAIRMTQSPFSLSASVGDRVTITCR |
| | | ASGNIHNYLAWYQQKPAKAPKLFIYNTKTLADGVPSRF |
| | | SGSGSGTDYTLTISSLQPEDFATYYCQHFWSSPWTFGGG |
| | | TKVEIKTTTPAPRPPTPAPTIASQPLSLRPEACRPAAGGA |
| | | VHTRGLDFACDIYIWAPLAGTCGVLLLSLVITLYCKRGR |
| | | KKLLYIFKQPFMRPVQTTQEEDGCSCRFPEEEEGGCELR |
| | | VKFSRSADAPAYQQGQNQLYNELNLGRREEYDVLDKR |
| | | RGRDPEMGGKPRRKNPQEGLYNELQKDKMAEAYSEIG |
| | | MKGERRRGKGHDGLYQGLSTATKDTYDALHMQALPP |
| | | R |
| SEQ ID NO: | Full CAR | ATGGCCCTCCCTGTCACCGCCCTGCTGCTTCCGCTGG |
| 2106 | nucleic acid | CTCTTCTGCTCCACGCCGCTCGGCCCCAAGTCCAACT |
| | sequence | CGTCCAAAGCGGTGCAGAAGTCAAGAAGCCCGGTTC |
| | | CTCCGTGAAAGTGTCCTGCAAAGCCTCGGGCTACACC |
| | | TTCACTAATTACTGGATGCATTGGGTCCGCCAGGCGC |
| | | CCGGACAGGGATTGGAATGGATGGGGTTCATCACGC |
| | | CGACCACCGGATACCCGGAGTACAACCAGAAGTTCA |
| | | AGGACAGAGTGACCATTACCGCCGATAAGTCCACCT |
| | | CCACCGCTTACATGGAGCTCTCCTCACTGCGGTCCGA |
| | | AGATACAGCCGTGTACTATTGTGCTCGCCGGAAAGTC |
| | | GGAAAGGGAGTGTACTACGCCCTGGACTATTGGGGC |
| | | CAGGGCACCACCGTGACCGTGTCCTCGGGAGGAGGG |
| | | GGTTCGGGCGGAGGCGGCTCCGGTGGAGGCGGAAGC |
| | | GGAGGGGGCGGATCAGCCATTAGGATGACTCAGTCC |
| | | CCTTTCTCCCTCTCCGCGAGCGTGGGCGACCGCGTGA |
| | | CGATCACTTGCCGGGCCTCGGGGAACATTCACAACTA |
| | | CCTGGCCTGGTACCAGCAGAAGCCGGCCAAGGCCCC |
| | | TAAGCTGTTCATCTACAACACCAAGACCCTTGCGGAC |
| | | GGAGTGCCATCGAGATTTTCCGGCTCGGGCTCTGGGA |
| | | CCGATTACACTCTGACTATCTCAAGCCTGCAACCTGA |
| | | GGACTTCGCCACTTACTACTGCCAGCACTTCTGGAGC |
| | | AGCCCCTGGACTTTCGGTGGCGGGACCAAGGTCGAA |
| | | ATCAAGACCACTACCCCAGCACCGAGGCCACCCACC |
| | | CCGGCTCCTACCATCGCCTCCCAGCCTCTGTCCCTGC |
| | | GTCCGGAGGCATGTAGACCCGCAGCTGGTGGGGCCG |
| | | TGCATACCCGGGGTCTTGACTTCGCCTGCGATATCTA |
| | | CATTTGGGCCCCTCTGGCTGGTACTTGCGGGGTCCTG |
| | | CTGCTTTCACTCGTGATCACTCTTTACTGTAAGCGCG |
| | | GTCGGAAGAAGCTGCTGTACATCTTTAAGCAACCCTT |
| | | CATGAGGCCTGTGCAGACTACTCAAGAGGAGGACGG |
| | | CTGTTCATGCCGGTTCCCAGAGGAGGAGGAAGGCGG |
| | | CTGCGAACTGCGCGTGAAATTCAGCCGCAGCGCAGA |
| | | TGCTCCAGCCTACCAGCAGGGGCAGAACCAGCTCTA |
| | | CAACGAACTCAATCTTGGTCGGAGAGAGGAGTACGA |
| | | CGTGCTGGACAAGCGGAGAGGACGGGACCCAGAAAT |
| | | GGGCGGGAAGCCGCGCAGAAAGAATCCCCAAGAGG |
| | | GCCTGTACAACGAGCTCCAAAAGGATAAGATGGCAG |
| | | AAGCCTATAGCGAGATTGGTATGAAAGGGGAACGCA |
| | | GAAGAGGCAAAGGCCACGACGGACTGTACCAGGGAC |
| | | TCAGCACCGCCACCAAGGACACCTATGACGCTCTTCA |
| | | CATGCAGGCCCTGCCGCCTCGG |
| CD20-C3H1 | | |
| SEQ ID NO: | HCDR1 | NYNLH |
| 2019 (Kabat) | | |
| SEQ ID NO: | HCDR2 | AIYPGNYDTSYNQKFKG |
| 2020 (Kabat) | | |
| SEQ ID NO: | HCDR3 | VDFGHSRYWYFDV |
| 2021 (Kabat) | | |
| SEQ ID NO: | HCDR1 | GYTFTNY |
| 2022 (Chothia) | | |
| SEQ ID NO: | HCDR2 | YPGNYD |
| 2023 (Chothia) | | |
| SEQ ID NO: | HCDR3 | VDFGHSRYWYFDV |
| 2021 (Chothia) | | |
| SEQ ID NO: | HCDR1 | GYTFTNYN |
| 2024 (IMGT) | | |
| SEQ ID NO: | HCDR2 | IYPGNYDT |
| 2025 (IMGT) | | |
| SEQ ID NO: | HCDR3 | ARVDFGHSRYWYFDV |
| 2026 (IMGT) | | |
| SEQ ID NO: | HCDR1 | GYTFTNYNLH |
| 2027 (Combined | | |
| Chothia and | | |
| Kabat) | | |
| SEQ ID NO: | HCDR2 | AIYPGNYDTSYNQKFKG |
| 2020 (Combined | | |
| Chothia and | | |
| Kabat) | | |
| SEQ ID NO: | HCDR3 | VDFGHSRYWYFDV |
| 2021 (Combined | | |
| Chothia and | | |
| Kabat) | | |
| SEQ ID NO: | VH | QVQLVQSGAEVKKPGASVKVSCKASGYTFTNYNLHWV |
| 2028 | | RQAPGQGLEWMGAIYPGNYDTSYNQKFKGRVTMTAD |
| | | KSTSTAYMELSSLRSEDTAVYYCARVDFGHSRYWYFD |
| | | VWGQGTTVTVSS |
| SEQ ID NO: | DNA VH | CAAGTCCAACTCGTCCAATCCGGTGCAGAAGTCAAG |
| 2107 | | AAACCCGGTGCATCCGTGAAAGTGTCATGCAAAGCC |
| | | TCCGGGTACACCTTCACTAACTACAACCTCCACTGGG |
| | | TCCGCCAGGCCCCGGGACAGGGACTGGAGTGGATGG |
| | | GGGCCATCTACCCGGGAAACTACGACACTTCATACA |
| | | ACCAGAAGTTCAAGGGCAGAGTGACCATGACTGCCG |
| | | ACAAGAGCACATCGACCGCCTACATGGAACTCAGCT |
| | | CCCTGCGCTCCGAGGATACTGCCGTCTACTACTGTGC |
| | | CCGGGTGGACTTCGGCCACTCCCGGTATTGGTATTTC |
| | | GATGTCTGGGGACAGGGAACCACCGTGACTGTGTCC |
| | | AGC |
| SEQ ID NO: | LCDR1 | RATSSVSSMN |
| 2030 (Kabat) | | |
| SEQ ID NO: | LCDR2 | ATSNLAS |
| 2031 (Kabat) | | |
| SEQ ID NO: | LCDR3 | QQWTFNPPT |
| 2032 (Kabat) | | |
| SEQ ID NO: | LCDR1 | TSSVSS |
| 2033 (Chothia) | | |
| SEQ ID NO: | LCDR2 | ATS |
| 2034 (Chothia) | | |
| SEQ ID NO: | LCDR3 | WTFNPP |
| 2035 (Chothia) | | |
| SEQ ID NO: | LCDR1 | SSVSS |
| 2036 (IMGT) | | |
| SEQ ID NO: | LCDR2 | ATS |
| 2034 (IMGT) | | |
| SEQ ID NO: | LCDR3 | QQWTFNPPT |
| 2032 (IMGT) | | |
| SEQ ID NO: | LCDR1 | RATSSVSSMN |
| 2030 (Combined | | |
| Chothia and | | |
| Kabat) | | |
| SEQ ID NO: | LCDR2 | ATSNLAS |
| 2031 (Combined | | |
| Chothia and | | |
| Kabat) | | |
| SEQ ID NO: | LCDR3 | QQWTFNPPT |
| 2032 (Combined | | |
| Chothia and | | |
| Kabat) | | |
| SEQ ID NO: | VL | EIVLTQSPATLSLSPGERATLSCRATSSVSSMNWYQQKP |
| 2108 | | GQAPRPLIHATSNLASGIPARFSGSGSGTDYTLTISSLEPE |
| | | DAAVYYCQQWTFNPPTFGQGTKLEIK |
| SEQ ID NO: | DNA VL | GAAATCGTGCTGACCCAGTCCCCTGCGACTCTGAGCC |
| 2109 | | TGAGCCCTGGGGAACGCGCCACTTTGTCATGCCGGGC |
| | | CACCTCCTCCGTGTCCTCCATGAACTGGTACCAGCAG |
| | | AAGCCCGGACAGGCTCCGCGGCCGCTGATCCATGCC |
| | | ACCTCCAACCTGGCCAGCGGCATTCCCGCGAGGTTTT |
| | | CCGGCTCGGGCTCTGGTACCGACTACACCCTGACCAT |
| | | CTCGAGCCTTGAGCCAGAAGATGCTGCGGTGTACTAC |
| | | TGCCAACAGTGGACCTTCAATCCGCCTACGTTCGGAC |
| | | AGGGGACCAAGCTGGAGATTAAG |
| SEQ ID NO: | Linker | GGGGSGGGGSGGGGSGGGGS |
| 1010 | | |
| SEQ ID NO: | scFv (VH- | QVQLVQSGAEVKKPGASVKVSCKASGYTFTNYNLHWV |
| 2110 | linker-VL) | RQAPGQGLEWMGAIYPGNYDTSYNQKFKGRVTMTAD |
| | | KSTSTAYMELSSLRSEDTAVYYCARVDFGHSRYWYFD |
| | | VWGQGTTVTVSSGGGGSGGGGSGGGGSGGGGSEIVLT |
| | | QSPATLSLSPGERATLSCRATSSVSSMNWYQQKPGQAP |
| | | RPLIHATSNLASGIPARFSGSGSGTDYTLTISSLEPE |
| | | DAAVYYCQQWTFNPPTFGQGTKLEIK |
| SEQ ID NO: | DNA scFv | CAAGTCCAACTCGTCCAATCCGGTGCAGAAGTCAAG |
| 2111 | (VH-linker- | AAACCCGGTGCATCCGTGAAAGTGTCATGCAAAGCC |
| | VL) | TCCGGGTACACCTTCACTAACTACAACCTCCACTGGG |
| | | TCCGCCAGGCCCCGGGACAGGGACTGGAGTGGATGG |
| | | GGGCCATCTACCCGGGAAACTACGACACTTCATACA |
| | | ACCAGAAGTTCAAGGGCAGAGTGACCATGACTGCCG |
| | | ACAAGAGCACATCGACCGCCTACATGGAACTCAGCT |
| | | CCCTGCGCTCCGAGGATACTGCCGTCTACTACTGTGC |
| | | CCGGGTGGACTTCGGCCACTCCCGGTATTGGTATTTC |
| | | GATGTCTGGGGACAGGGAACCACCGTGACTGTGTCC |
| | | AGCGGGGGCGGAGGATCGGGTGGCGGAGGTTCGGGG |
| | | GGAGGAGGATCAGGCGGCGGCGGATCGGAAATCGTG |
| | | CTGACCCAGTCCCCTGCGACTCTGAGCCTGAGCCCTG |
| | | GGGAACGCGCCACTTTGTCATGCCGGGCCACCTCCTC |
| | | CGTGTCCTCCATGAACTGGTACCAGCAGAAGCCCGG |
| | | ACAGGCTCCGCGGCCGCTGATCCATGCCACCTCCAAC |
| | | CTGGCCAGCGGCATTCCCGCGAGGTTTTCCGGCTCGG |
| | | GCTCTGGTACCGACTACACCCTGACCATCTCGAGCCT |
| | | TGAGCCAGAAGATGCTGCGGTGTACTACTGCCAACA |
| | | GTGGACCTTCAATCCGCCTACGTTCGGACAGGGGACC |
| | | AAGCTGGAGATTAAG |
| SEQ ID NO: | Full CAR | MALPVTALLLPLALLLHAARPQVQLVQSGAEVKKPGAS |
| 2112 | amino acid | VKVSCKASGYTFTNYNLHWVRQAPGQGLEWMGAIYP |
| | sequence | GNYDTSYNQKFKGRVTMTADKSTSTAYMELSSLRSED |
| | | TAVYYCARVDFGHSRYWYFDVWGQGTTVTVSSGGGG |
| | | SGGGGSGGGGSGGGGSEIVLTQSPATLSLSPGERATLSC |
| | | RATSSVSSMNWYQQKPGQAPRPLIHATSNLASGIPARFS |
| | | GSGSGTDYTLTISSLEPEDAAVYYCQQWTFNPPTFGQGT |
| | | KLEIKTTTPAPRPPTPAPTIASQPLSLRPEACRPAAGGAV |
| | | HTRGLDFACDIYIWAPLAGTCGVLLLSLVITLYCKRGRK |
| | | KLLYIFKQPFMRPVQTTQEEDGCSCRFPEEEEGGCELRV |
| | | KFSRSADAPAYQQGQNQLYNELNLGRREEYDVLDKRR |
| | | GRDPEMGGKPRRKNPQEGLYNELQKDKMAEAYSEIGM |
| | | KGERRRGKGHDGLYQGLSTATKDTYDALHMQALPPR |
| SEQ ID NO: | Full CAR | ATGGCCCTCCCTGTCACCGCCCTGCTGCTTCCGCTGG |
| 2113 | nucleic acid | CTCTTCTGCTCCACGCCGCTCGGCCCCAAGTCCAACT |
| | sequence | CGTCCAATCCGGTGCAGAAGTCAAGAAACCCGGTGC |
| | | ATCCGTGAAAGTGTCATGCAAAGCCTCCGGGTACACC |
| | | TTCACTAACTACAACCTCCACTGGGTCCGCCAGGCCC |
| | | CGGGACAGGGACTGGAGTGGATGGGGGCCATCTACC |
| | | CGGGAAACTACGACACTTCATACAACCAGAAGTTCA |
| | | AGGGCAGAGTGACCATGACTGCCGACAAGAGCACAT |
| | | CGACCGCCTACATGGAACTCAGCTCCCTGCGCTCCGA |
| | | GGATACTGCCGTCTACTACTGTGCCCGGGTGGACTTC |
| | | GGCCACTCCCGGTATTGGTATTTCGATGTCTGGGGAC |
| | | AGGGAACCACCGTGACTGTGTCCAGCGGGGGCGGAG |
| | | GATCGGGTGGCGGAGGTTCGGGGGGAGGAGGATCAG |
| | | GCGGCGGCGGATCGGAAATCGTGCTGACCCAGTCCC |
| | | CTGCGACTCTGAGCCTGAGCCCTGGGGAACGCGCCA |
| | | CTTTGTCATGCCGGGCCACCTCCTCCGTGTCCTCCATG |
| | | AACTGGTACCAGCAGAAGCCCGGACAGGCTCCGCGG |
| | | CCGCTGATCCATGCCACCTCCAACCTGGCCAGCGGCA |
| | | TTCCCGCGAGGTTTTCCGGCTCGGGCTCTGGTACCGA |
| | | CTACACCCTGACCATCTCGAGCCTTGAGCCAGAAGAT |
| | | GCTGCGGTGTACTACTGCCAACAGTGGACCTTCAATC |
| | | CGCCTACGTTCGGACAGGGGACCAAGCTGGAGATTA |
| | | AGACCACTACCCCAGCACCGAGGCCACCCACCCCGG |
| | | CTCCTACCATCGCCTCCCAGCCTCTGTCCCTGCGTCCG |
| | | GAGGCATGTAGACCCGCAGCTGGTGGGGCCGTGCAT |
| | | ACCCGGGGTCTTGACTTCGCCTGCGATATCTACATTT |
| | | GGGCCCCTCTGGCTGGTACTTGCGGGGTCCTGCTGCT |
| | | TTCACTCGTGATCACTCTTTACTGTAAGCGCGGTCGG |
| | | AAGAAGCTGCTGTACATCTTTAAGCAACCCTTCATGA |
| | | GGCCTGTGCAGACTACTCAAGAGGAGGACGGCTGTT |
| | | CATGCCGGTTCCCAGAGGAGGAGGAAGGCGGCTGCG |
| | | AACTGCGCGTGAAATTCAGCCGCAGCGCAGATGCTC |
| | | CAGCCTACCAGCAGGGGCAGAACCAGCTCTACAACG |
| | | AACTCAATCTTGGTCGGAGAGAGGAGTACGACGTGC |
| | | TGGACAAGCGGAGAGGACGGGACCCAGAAATGGGC |
| | | GGGAAGCCGCGCAGAAAGAATCCCCAAGAGGGCCTG |
| | | TACAACGAGCTCCAAAAGGATAAGATGGCAGAAGCC |
| | | TATAGCGAGATTGGTATGAAAGGGGAACGCAGAAGA |
| | | GGCAAAGGCCACGACGGACTGTACCAGGGACTCAGC |
| | | ACCGCCACCAAGGACACCTATGACGCTCTTCACATGC |
| | | AGGCCCTGCCGCCTCGG |
| CD20-C3H3 | | |
| SEQ ID NO: | HCDR1 | NYNLH |
| 2019 (Kabat) | | |
| SEQ ID NO: | HCDR2 | AIYPGNYDTSYNQKFKG |
| 2020 (Kabat) | | |
| SEQ ID NO: | HCDR3 | VDFGHSRYWYFDV |
| 2021 (Kabat) | | |
| SEQ ID NO: | HCDR1 | GYTFTNY |
| 2022 (Chothia) | | |
| SEQ ID NO: | HCDR2 | YPGNYD |
| 2023 (Chothia) | | |
| SEQ ID NO: | HCDR3 | VDFGHSRYWYFDV |
| 2021 (Chothia) | | |
| SEQ ID NO: | HCDR1 | GYTFTNYN |
| 2024 (IMGT) | | |
| SEQ ID NO: | HCDR2 | IYPGNYDT |
| 2025 (IMGT) | | |
| SEQ ID NO: | HCDR3 | ARVDFGHSRYWYFDV |
| 2026 (IMGT) | | |
| SEQ ID NO: | VH | QVQLVQSGAEVKKPGASVKVSCKASGYTFTNYWMHW |
| 2072 | | VRQAPGQGLEWMGFITPTTGYPEYNQKFKDRVTMTAD |
| | | KSTSTAYMELSSLRSEDTAVYYCARRKVGKGVYYALD |
| | | YWGQGTTVTVSS |
| SEQ ID NO: | DNA VH | CAAGTCCAACTCGTCCAGTCGGGAGCAGAAGTCAAG |
| 2114 | | AAGCCCGGATCATCCGTGAAAGTGTCCTGCAAAGCCT |
| | | CAGGCTACACCTTTACCAACTACAACTTGCACTGGGT |
| | | CAGACAGGCCCCGGGACAGGGCCTGGAGTGGATGGG |
| | | CGCCATCTACCCCGGAAACTATGACACCTCGTACAAC |
| | | CAGAAGTTCAAGGGTCGCGTGACTATCACGGCTGAC |
| | | AAGTCCACTAGCACCGCGTACATGGAACTTTCCTCAC |
| | | TGCGGTCCGAGGATACTGCGGTGTACTACTGCGCCCG |
| | | GGTGGACTTCGGACACTCGAGATATTGGTACTTCGAT |
| | | GTCTGGGGACAGGGGACCACCGTGACTGTGTCCTCC |
| SEQ ID NO: | LCDR1 | RATSSVSSMN |
| 2030 (Kabat) | | |
| SEQ ID NO: | LCDR2 | ATSNLAS |
| 2031 (Kabat) | | |
| SEQ ID NO: | LCDR3 | QQWTFNPPT |
| 2032 (Kabat) | | |
| SEQ ID NO: | LCDR1 | TSSVSS |
| 2033 (Chothia) | | |
| SEQ ID NO: | LCDR2 | ATS |
| 2034 (Chothia) | | |
| SEQ ID NO: | LCDR3 | WTFNPP |
| 2035 (Chothia) | | |
| SEQ ID NO: | LCDR1 | SSVSS |
| 2036 (IMGT) | | |
| SEQ ID NO: | LCDR2 | ATS |
| 2034 (IMGT) | | |
| SEQ ID NO: | LCDR3 | QQWTFNPPT |
| 2032 (IMGT) | | |
| SEQ ID NO: | LCDR1 | RATSSVSSMN |
| 2030 (Combined | | |
| Chothia and | | |
| Kabat) | | |
| SEQ ID NO: | LCDR2 | ATSNLAS |
| 2031 (Combined | | |
| Chothia and | | |
| Kabat) | | |
| SEQ ID NO: | LCDR3 | QQWTFNPPT |
| 2032 (Combined | | |
| Chothia and | | |
| Kabat | | |
| SEQ ID NO: | VL | AIRMTQSPFSLSASVGDRVTITCRASGNIHNYLAWYQQ |
| 2095 | | KPAKAPKLFIYNTKTLADGVPSRFSGSGSGTDYTLTIS |
| | | SLQPEDFATYYCQHFWSSPWTFGGGTKVEIK |
| SEQ ID NO: | DNA VL | GAAATTGTGCTGACCCAGTCTCCCGCAACCCTGTCCC |
| 2115 | | TGAGCCCTGGAGAGCGCGCCACCCTGTCCTGCCGGGC |
| | | CACATCCTCCGTGTCGTCCATGAACTGGTACCAGCAG |
| | | AAGCCCGGCCAAGCCCCGAGGCCTCTGATTCATGCTA |
| | | CCTCAAATCTGGCCAGCGGAATCCCGGCGCGCTTCTC |
| | | CGGCTCGGGCAGCGGTACTGACTACACTCTCACCATC |
| | | TCGTCCCTCGAACCGGAGGACGCCGCCGTCTACTACT |
| | | GTCAGCAGTGGACCTTCAACCCACCTACTTTCGGACA |
| | | AGGGACCAAGCTGGAGATCAAG |
| SEQ ID NO: | Linker | GGGSGGGGSGGGGSGGGGS |
| 2116 | | |
| SEQ ID NO: | scFv (VH- | QVQLVQSGAEVKKPGASVKVSCKASGYTFTNYWMHW |
| 2097 | linker-VL) | VRQAPGQGLEWMGFITPTTGYPEYNQKFKDRVTMTAD |
| | | KSTSTAYMELSSLRSEDTAVYYCARRKVGKGVYYALD |
| | | YWGQGTTVTVSSGGGGSGGGGSGGGGSGGGGSAIRMT |
| | | QSPFSLSASVGDRVTITCRASGNIHNYLAWYQQKPAKA |
| | | PKLFIYNTKTLADGVPSRFSGSGSGTDYTLTISSLQP |
| | | EDFATYYCQHFWSSPWTFGGGTKVEIK |
| SEQ ID NO: | DNA scFv | CAAGTCCAACTCGTCCAGTCGGGAGCAGAAGTCAAG |
| 2117 | (VH-linker- | AAGCCCGGATCATCCGTGAAAGTGTCCTGCAAAGCCT |
| | VL) | CAGGCTACACCTTTACCAACTACAACTTGCACTGGGT |
| | | CAGACAGGCCCCGGGACAGGGCCTGGAGTGGATGGG |
| | | CGCCATCTACCCCGGAAACTATGACACCTCGTACAAC |
| | | CAGAAGTTCAAGGGTCGCGTGACTATCACGGCTGAC |
| | | AAGTCCACTAGCACCGCGTACATGGAACTTTCCTCAC |
| | | TGCGGTCCGAGGATACTGCGGTGTACTACTGCGCCCG |
| | | GGTGGACTTCGGACACTCGAGATATTGGTACTTCGAT |
| | | GTCTGGGGACAGGGGACCACCGTGACTGTGTCCTCCG |
| | | GGGGCGGTGGCAGCGGGGGAGGCGGAAGCGGCGGA |
| | | GGGGGTTCCGGGGGTGGAGGAAGCGAAATTGTGCTG |
| | | ACCCAGTCTCCCGCAACCCTGTCCCTGAGCCCTGGAG |
| | | AGCGCGCCACCCTGTCCTGCCGGGCCACATCCTCCGT |
| | | GTCGTCCATGAACTGGTACCAGCAGAAGCCCGGCCA |
| | | AGCCCCGAGGCCTCTGATTCATGCTACCTCAAATCTG |
| | | GCCAGCGGAATCCCGGCGCGCTTCTCCGGCTCGGGCA |
| | | GCGGTACTGACTACACTCTCACCATCTCGTCCCTCGA |
| | | ACCGGAGGACGCCGCCGTCTACTACTGTCAGCAGTG |
| | | GACCTTCAACCCACCTACTTTCGGACAAGGGACCAAG |
| | | CTGGAGATCAAG |
| SEQ ID NO: | Full CAR | MALPVTALLLPLALLLHAARPQVQLVQSGAEVKKPGSS |
| 2118 | amino acid | VKVSCKASGYTFTNYNLHWVRQAPGQGLEWMGAIYP |
| | sequence | GNYDTSYNQKFKGRVTITADKSTSTAYMELSSLRSEDT |
| | | AVYYCARVDFGHSRYWYFDVWGQGTTVTVSSGGGGS |
| | | GGGGSGGGGSGGGGSEIVLTQSPATLSLSPGERATLSCR |
| | | ATSSVSSMNWYQQKPGQAPRPLIHATSNLASGIPARFSG |
| | | SGSGTDYTLTISSLEPEDAAVYYCQQWTFNPPTFGQGTK |
| | | LEIKTTTPAPRPPTPAPTIASQPLSLRPEACRPAAGGAVH |
| | | TRGLDFACDIYIWAPLAGTCGVLLLSLVITLYCKRGRKK |
| | | LLYIFKQPFMRPVQTTQEEDGCSCRFPEEEEGGCELRVK |
| | | FSRSADAPAYQQGQNQLYNELNLGRREEYDVLDKRRG |
| | | RDPEMGGKPRRKNPQEGLYNELQKDKMAEAYSEIGMK |
| | | GERRRGKGHDGLYQGLSTATKDTYDALHMQALPPR |
| SEQ ID NO: | Full CAR | ATGGCCCTCCCTGTCACCGCCCTGCTGCTTCCGCTGG |
| 2119 | nucleic acid | CTCTTCTGCTCCACGCCGCTCGGCCCCAAGTCCAACT |
| | sequence | CGTCCAGTCGGGAGCAGAAGTCAAGAAGCCCGGATC |
| | | ATCCGTGAAAGTGTCCTGCAAAGCCTCAGGCTACACC |
| | | TTTACCAACTACAACTTGCACTGGGTCAGACAGGCCC |
| | | CGGGACAGGGCCTGGAGTGGATGGGCGCCATCTACC |
| | | CCGGAAACTATGACACCTCGTACAACCAGAAGTTCA |
| | | AGGGTCGCGTGACTATCACGGCTGACAAGTCCACTA |
| | | GCACCGCGTACATGGAACTTTCCTCACTGCGGTCCGA |
| | | GGATACTGCGGTGTACTACTGCGCCCGGGTGGACTTC |
| | | GGACACTCGAGATATTGGTACTTCGATGTCTGGGGAC |
| | | AGGGGACCACCGTGACTGTGTCCTCCGGGGGCGGTG |
| | | GCAGCGGGGGAGGCGGAAGCGGCGGAGGGGGTTCC |
| | | GGGGGTGGAGGAAGCGAAATTGTGCTGACCCAGTCT |
| | | CCCGCAACCCTGTCCCTGAGCCCTGGAGAGCGCGCCA |
| | | CCCTGTCCTGCCGGGCCACATCCTCCGTGTCGTCCAT |
| | | GAACTGGTACCAGCAGAAGCCCGGCCAAGCCCCGAG |
| | | GCCTCTGATTCATGCTACCTCAAATCTGGCCAGCGGA |
| | | ATCCCGGCGCGCTTCTCCGGCTCGGGCAGCGGTACTG |
| | | ACTACACTCTCACCATCTCGTCCCTCGAACCGGAGGA |
| | | CGCCGCCGTCTACTACTGTCAGCAGTGGACCTTCAAC |
| | | CCACCTACTTTCGGACAAGGGACCAAGCTGGAGATC |
| | | AAGACCACTACCCCAGCACCGAGGCCACCCACCCCG |
| | | GCTCCTACCATCGCCTCCCAGCCTCTGTCCCTGCGTCC |
| | | GGAGGCATGTAGACCCGCAGCTGGTGGGGCCGTGCA |
| | | TACCCGGGGTCTTGACTTCGCCTGCGATATCTACATT |
| | | TGGGCCCCTCTGGCTGGTACTTGCGGGGTCCTGCTGC |
| | | TTTCACTCGTGATCACTCTTTACTGTAAGCGCGGTCG |
| | | GAAGAAGCTGCTGTACATCTTTAAGCAACCCTTCATG |
| | | AGGCCTGTGCAGACTACTCAAGAGGAGGACGGCTGT |
| | | TCATGCCGGTTCCCAGAGGAGGAGGAAGGCGGCTGC |
| | | GAACTGCGCGTGAAATTCAGCCGCAGCGCAGATGCT |
| | | CCAGCCTACCAGCAGGGGCAGAACCAGCTCTACAAC |
| | | GAACTCAATCTTGGTCGGAGAGAGGAGTACGACGTG |
| | | CTGGACAAGCGGAGAGGACGGGACCCAGAAATGGGC |
| | | GGGAAGCCGCGCAGAAAGAATCCCCAAGAGGGCCTG |
| | | TACAACGAGCTCCAAAAGGATAAGATGGCAGAAGCC |
| | | TATAGCGAGATTGGTATGAAAGGGGAACGCAGAAGA |
| | | GGCAAAGGCCACGACGGACTGTACCAGGGACTCAGC |
| | | ACCGCCACCAAGGACACCTATGACGCTCTTCACATGC |
| | | AGGCCCTGCCGCCTCGG |
| CD20-C3H4 | | |
| SEQ ID NO: | HCDR1 | NYNLH |
| 2019 (Kabat) | | |
| SEQ ID NO: | HCDR2 | AIYPGNYDTSYNQKFKG |
| 2020 (Kabat) | | |
| SEQ ID NO: | HCDR3 | VDFGHSRYWYFDV |
| 2021 (Kabat) | | |
| SEQ ID NO: | HCDR1 | GYTFTNY |
| 2022 (Chothia) | | |
| SEQ ID NO: | HCDR2 | YPGNYD |
| 2023 (Chothia) | | |
| SEQ ID NO: | HCDR3 | VDFGHSRYWYFDV |
| 2021 (Chothia) | | |
| SEQ ID NO: | HCDR1 | GYTFTNYN |
| 2024 (IMGT) | | |
| SEQ ID NO: | HCDR2 | IYPGNYDT |
| 2025 (IMGT) | | |
| SEQ ID NO: | HCDR3 | ARVDFGHSRYWYFDV |
| 2026 (IMGT) | | |
| SEQ ID NO: | HCDR1 | GYTFTNYNLH |
| 2027 (Combined | | |
| Chothia and | | |
| Kabat) | | |
| SEQ ID NO: | HCDR2 | AIYPGNYDTSYNQKFKG |
| 2020 (Combined | | |
| Chothia and | | |
| Kabat) | | |
| SEQ ID NO: | HCDR3 | VDFGHSRYWYFDV |
| 2021 (Combined | | |
| Chothia and | | |
| Kabat) | | |
| SEQ ID NO: | VH | QVQLVQSGAEVKKPGSSVKVSCKASGYTFTNYNLHWV |
| 2120 | | RQAPGQGLEWMGAIYPGNYDTSYNQKFKGRVTITADK |
| | | STSTAYMELSSLRSEDTAVYYCARVDFGHSRYWYFDV |
| | | WGQGTTVTVSS |
| SEQ ID NO: | DNA VH | CAAGTCCAACTCGTCCAGTCGGGAGCAGAAGTCAAG |
| 2114 | | AAGCCCGGATCATCCGTGAAAGTGTCCTGCAAAGCCT |
| | | CAGGCTACACCTTTACCAACTACAACTTGCACTGGGT |
| | | CAGACAGGCCCCGGGACAGGGCCTGGAGTGGATGGG |
| | | CGCCATCTACCCCGGAAACTATGACACCTCGTACAAC |
| | | CAGAAGTTCAAGGGTCGCGTGACTATCACGGCTGAC |
| | | AAGTCCACTAGCACCGCGTACATGGAACTTTCCTCAC |
| | | TGCGGTCCGAGGATACTGCGGTGTACTACTGCGCCCG |
| | | GGTGGACTTCGGACACTCGAGATATTGGTACTTCGAT |
| | | GTCTGGGGACAGGGGACCACCGTGACTGTGTCCTCC |
| SEQ ID NO: | LCDR1 | RATSSVSSMN |
| 2030 (Kabat) | | |
| SEQ ID NO: | LCDR2 | ATSNLAS |
| 2031 (Kabat) | | |
| SEQ ID NO: | LCDR3 | QQWTFNPPT |
| 2032 (Kabat) | | |
| SEQ ID NO: | LCDR1 | TSSVSS |
| 2033 (Chothia) | | |
| SEQ ID NO: | LCDR2 | ATS |
| 2034 (Chothia) | | |
| SEQ ID NO: | LCDR3 | WTFNPP |
| 2035 (Chothia) | | |
| SEQ ID NO: | LCDR | SSVSS |
| 2036 (IMGT) | | |
| SEQ ID NO: | LCDR2 | ATS |
| 2034 (IMGT) | | |
| SEQ ID NO: | LCDR3 | QQWTFNPPT |
| 2032 (IMGT) | | |
| SEQ ID NO: | LCDR1 | RATSSVSSMN |
| 2030 (Combined | | |
| Chothia and | | |
| Kabat) | | |
| SEQ ID NO: | LCDR2 | ATSNLAS |
| 2031 (Combined | | |
| Chothia and | | |
| Kabat) | | |
| SEQ ID NO: | LCDR3 | QQWTFNPPT |
| 2032 (Combined | | |
| Chothia and | | |
| Kabat) | | |
| SEQ ID NO: | VL | EIVLTQSPATLSLSPGERATLSCRATSSVSSMNWYQQKP |
| 2108 | | GQAPRPLIHATSNLASGIPARFSGSGSGTDYTLTISSLE |
| | | PEDAAVYYCQQWTFNPPTFGQGTKLEIK |
| SEQ ID NO: | DNA VL | GAAATTGTGCTGACCCAGTCTCCCGCAACCCTGTCCC |
| 2115 | | TGAGCCCTGGAGAGCGCGCCACCCTGTCCTGCCGGGC |
| | | CACATCCTCCGTGTCGTCCATGAACTGGTACCAGCAG |
| | | AAGCCCGGCCAAGCCCCGAGGCCTCTGATTCATGCTA |
| | | CCTCAAATCTGGCCAGCGGAATCCCGGCGCGCTTCTC |
| | | CGGCTCGGGCAGCGGTACTGACTACACTCTCACCATC |
| | | TCGTCCCTCGAACCGGAGGACGCCGCCGTCTACTACT |
| | | GTCAGCAGTGGACCTTCAACCCACCTACTTTCGGACA |
| | | AGGGACCAAGCTGGAGATCAAG |
| SEQ ID NO: | Linker | GGGGSGGGGSGGGGSGGGGS |
| 1010 | | |
| SEQ ID NO: | scFv (VH- | QVQLVQSGAEVKKPGSSVKVSCKASGYTFTNYNLHWV |
| 2121 | linker-VL) | RQAPGQGLEWMGAIYPGNYDTSYNQKFKGRVTITADK |
| | | STSTAYMELSSLRSEDTAVYYCARVDFGHSRYWYFDV |
| | | WGQGTTVTVSSGGGGSGGGGSGGGGSGGGGSEIVLTQ |
| | | SPATLSLSPGERATLSCRATSSVSSMNWYQQKPGQAPR |
| | | PLIHATSNLASGIPARFSGSGSGTDYTLTISSLEPEDA |
| | | AVYYCQQWTFNPPTFGQGTKLEIK |
| SEQ ID NO: | DNA scFv | CAAGTCCAACTCGTCCAATCCGGCGCAGAAGTCAAG |
| 2122 | (VH-linker- | AAACCAGGATCGTCCGTGAAAGTGTCCTGCAAGGCG |
| | VL | TCCGGGTACACCTTCACTAATTACAACCTCCACTGGG |
| | | TCAGACAGGCCCCAGGACAGGGCCTGGAATGGATGG |
| | | GCGCCATCTACCCTGGAAACTACGATACCTCGTACAA |
| | | CCAGAAGTTCAAGGGCCGCGTGACTATTACCGCCGA |
| | | CAAGAGCACCTCCACCGCCTATATGGAACTGTCGTCC |
| | | CTGCGGTCCGAGGACACTGCCGTGTACTACTGTGCAA |
| | | GGGTGGACTTCGGTCACTCCCGGTATTGGTACTTCGA |
| | | CGTCTGGGGACAGGGGACCACTGTGACCGTGTCGTC |
| | | GGGAGGCGGTGGAAGCGGCGGTGGCGGAAGCGGAG |
| | | GCGGCGGATCAGGGGGCGGAGGAAGCGACATTCAGC |
| | | TTACCCAGTCACCGTCCTTCCTGAGCGCCTCCGTGGG |
| | | AGATCGCGTGACCATCACATGCCGCGCCACTTCCTCG |
| | | GTGTCCTCCATGAACTGGTACCAGCAGAAGCCCGGA |
| | | AAGGCTCCTAAGCCTCTGATCCATGCGACCTCCAACT |
| | | TGGCTTCCGGGGTGCCGTCACGGTTCAGCGGCAGCGG |
| | | TTCAGGAACTGAGTACACCCTGACTATTAGCTCTCTC |
| | | CAACCCGAGGACTTCGCCACCTACTACTGCCAGCAGT |
| | | GGACCTTCAACCCGCCCACGTTTGGGCAGGGTACCAA |
| | | GCTGGAGATCAAG |
| SEQ ID NO: | Full CAR | MALPVTALLLPLALLLHAARPQVQLVQSGAEVKKPGSS |
| 2123 | amino acid | VKVSCKASGYTFTNYNLHWVRQAPGQGLEWMGAIYP |
| | sequence | GNYDTSYNQKFKGRVTITADKSTSTAYMELSSLRSEDT |
| | | AVYYCARVDFGHSRYWYFDVWGQGTTVTVSSGGGGS |
| | | GGGGSGGGGSGGGGSDIQLTQSPSFLSASVGDRVTITCR |
| | | ATSSVSSMNWYQQKPGKAPKPLIHATSNLASGVPSRFS |
| | | GSGSGTEYTLTISSLQPEDFATYYCQQWTFNPPTFGQGT |
| | | KLEIKTTTPAPRPPTPAPTIASQPLSLRPEACRPAAGGAV |
| | | HTRGLDFACDIYIWAPLAGTCGVLLLSLVITLYCKRGRK |
| | | KLLYIFKQPFMRPVQTTQEEDGCSCRFPEEEEGGCELRV |
| | | KFSRSADAPAYQQGQNQLYNELNLGRREEYDVLDKRR |
| | | GRDPEMGGKPRRKNPQEGLYNELQKDKMAEAYSEIGM |
| | | KGERRRGKGHDGLYQGLSTATKDTYDALHMQALPPR |
| SEQ ID NO: | Full CAR | ATGGCCCTCCCTGTCACCGCCCTGCTGCTTCCGCTGG |
| 2124 | nucleic acid | CTCTTCTGCTCCACGCCGCTCGGCCCCAAGTCCAACT |
| | sequence | CGTCCAATCCGGCGCAGAAGTCAAGAAACCAGGATC |
| | | GTCCGTGAAAGTGTCCTGCAAGGCGTCCGGGTACACC |
| | | TTCACTAATTACAACCTCCACTGGGTCAGACAGGCCC |
| | | CAGGACAGGGCCTGGAATGGATGGGCGCCATCTACC |
| | | CTGGAAACTACGATACCTCGTACAACCAGAAGTTCA |
| | | AGGGCCGCGTGACTATTACCGCCGACAAGAGCACCT |
| | | CCACCGCCTATATGGAACTGTCGTCCCTGCGGTCCGA |
| | | GGACACTGCCGTGTACTACTGTGCAAGGGTGGACTTC |
| | | GGTCACTCCCGGTATTGGTACTTCGACGTCTGGGGAC |
| | | AGGGGACCACTGTGACCGTGTCGTCGGGAGGCGGTG |
| | | GAAGCGGCGGTGGCGGAAGCGGAGGCGGCGGATCA |
| | | GGGGGCGGAGGAAGCGACATTCAGCTTACCCAGTCA |
| | | CCGTCCTTCCTGAGCGCCTCCGTGGGAGATCGCGTGA |
| | | CCATCACATGCCGCGCCACTTCCTCGGTGTCCTCCAT |
| | | GAACTGGTACCAGCAGAAGCCCGGAAAGGCTCCTAA |
| | | GCCTCTGATCCATGCGACCTCCAACTTGGCTTCCGGG |
| | | GTGCCGTCACGGTTCAGCGGCAGCGGTTCAGGAACT |
| | | GAGTACACCCTGACTATTAGCTCTCTCCAACCCGAGG |
| | | ACTTCGCCACCTACTACTGCCAGCAGTGGACCTTCAA |
| | | CCCGCCCACGTTTGGGCAGGGTACCAAGCTGGAGAT |
| | | CAAGACCACTACCCCAGCACCGAGGCCACCCACCCC |
| | | GGCTCCTACCATCGCCTCCCAGCCTCTGTCCCTGCGT |
| | | CCGGAGGCATGTAGACCCGCAGCTGGTGGGGCCGTG |
| | | CATACCCGGGGTCTTGACTTCGCCTGCGATATCTACA |
| | | TTTGGGCCCCTCTGGCTGGTACTTGCGGGGTCCTGCT |
| | | GCTTTCACTCGTGATCACTCTTTACTGTAAGCGCGGT |
| | | CGGAAGAAGCTGCTGTACATCTTTAAGCAACCCTTCA |
| | | TGAGGCCTGTGCAGACTACTCAAGAGGAGGACGGCT |
| | | GTTCATGCCGGTTCCCAGAGGAGGAGGAAGGCGGCT |
| | | GCGAACTGCGCGTGAAATTCAGCCGCAGCGCAGATG |
| | | CTCCAGCCTACCAGCAGGGGCAGAACCAGCTCTACA |
| | | ACGAACTCAATCTTGGTCGGAGAGAGGAGTACGACG |
| | | TGCTGGACAAGCGGAGAGGACGGGACCCAGAAATGG |
| | | GCGGGAAGCCGCGCAGAAAGAATCCCCAAGAGGGCC |
| | | TGTACAACGAGCTCCAAAAGGATAAGATGGCAGAAG |
| | | CCTATAGCGAGATTGGTATGAAAGGGGAACGCAGAA |
| | | GAGGCAAAGGCCACGACGGACTGTACCAGGGACTCA |
| | | GCACCGCCACCAAGGACACCTATGACGCTCTTCACAT |
| | | GCAGGCCCTGCCGCCTCGG |
| CD20-C5H2 | | |
| SEQ ID NO: | HCDR1 | SYNMH |
| 2043 (Kabat) | | |
| SEQ ID NO: | HCDR2 | AIYPGNGDTSYNPKFKG |
| 2044 (Kabat) | | |
| SEQ ID NO: | HCDR3 | SYFYGSSSWYFDV |
| 2045 (Kabat) | | |
| SEQ ID NO: | HCDR1 | GYTFTSY |
| 2046 (Chothia) | | |
| SEQ ID NO: | HCDR2 | YPGNGD |
| 2047 (Chothia) | | |
| SEQ ID NO: | HCDR3 | SYFYGSSSWYFDV |
| 2045 (Chothia) | | |
| SEQ ID NO: | HCDR1 | GYTFTSYN |
| 2048 (IMGT) | | |
| SEQ ID NO: | HCDR2 | IYPGNGDT |
| 2049 (IMGT) | | |
| SEQ ID NO: | HCDR3 | ARSYFYGSSSWYFDV |
| 2050 (IMGT) | | |
| SEQ ID NO: | HCDR1 | GYTFTSYNMH |
| 2051 (Combined | | |
| Chothia and | | |
| Kabat) | | |
| SEQ ID NO: | HCDR2 | AIYPGNGDTSYNPKFKG |
| 2044 (Combined | | |
| Chothia and | | |
| Kabat) | | |
| SEQ ID NO: | HCDR3 | SYFYGSSSWYFDV |
| 2045 (Combined | | |
| Chothia and | | |
| Kabat) | | |
| SEQ ID NO: | VH | QVQLVQSGAEVKKPGASVKVSCKASGYTFTSYNMHW |
| 2052 | | VRQAPGQGLEWMGAIYPGNGDTSYNPKFKGRVTMTA |
| | | DKSTRTAYMELSSLRSEDTAVYYCARSYFYGSSSWYFD |
| | | VWGQGTTVTVSS |
| SEQ ID NO: | DNA VH | CAAGTCCAACTCGTCCAGTCAGGAGCAGAAGTCAAG |
| 2125 | | AAACCTGGAGCTTCCGTGAAAGTGTCGTGCAAGGCCT |
| | | CCGGCTACACCTTCACCTCTTACAACATGCACTGGGT |
| | | CAGACAGGCCCCTGGTCAAGGACTGGAATGGATGGG |
| | | AGCGATCTACCCGGGCAACGGAGACACTTCGTACAA |
| | | CCCCAAGTTCAAGGGACGGGTCACTATGACCGCCGA |
| | | TAAGAGCACGCGCACCGCGTACATGGAACTGAGCAG |
| | | CCTGCGCTCCGAGGACACTGCCGTGTATTACTGCGCG |
| | | AGGAGCTACTTCTACGGATCATCGTCGTGGTACTTCG |
| | | ACGTCTGGGGCCAGGGCACCACCGTGACCGTGTCATC |
| | | C |
| SEQ ID NO: | LCDR1 | RASSSVSSMH |
| 2054 (Kabat) | | |
| SEQ ID NO: | LCDR2 | ATSNLAS |
| 2031 (Kabat) | | |
| SEQ ID NO: | LCDR3 | QQWIFNPPT |
| 2055 (Kabat) | | |
| SEQ ID NO: | LCDR1 | SSSVSS |
| 2056 (Chothia) | | |
| SEQ ID NO | LCDR2 | ATS |
| 2034 (Chothia) | | |
| SEQ ID NO: | LCDR3 | WIFNPP |
| 2057 (Chothia) | | |
| SEQ ID NO: | LCDR1 | SSVSS |
| 2036 (IMGT) | | |
| SEQ ID NO: | LCDR2 | ATS |
| 2034 (IMGT) | | |
| SEQ ID NO: | LCDR3 | QQWIFNPPT |
| 2055 (IMGT) | | |
| SEQ ID NO: | LCDR1 | RASSSVSSMH |
| 2054 (Combined | | |
| Chothia and | | |
| Kabat) | | |
| SEQ ID NO: | LCDR2 | ATSNLAS |
| 2031 (Combined | | |
| Chothia and | | |
| Kabat) | | |
| SEQ ID NO: | LCDR3 | QQWIFNPPT |
| 2055 (Combined | | |
| Chothia and | | |
| Kabat) | | |
| SEQ ID NO: | VL | DIQLTQSPSFLSASVGDRVTITCRASSSVSSMHWYQQKP |
| 2126 | | GKAPKPLIFATSNLASGVPSRFSGSGSGTEYTLTISSLQ |
| | | PEDFATYYCQQWIFNPPTFGGGTKVEIK |
| SEQ ID NO: | DNA VL | GATATTCAGCTGACCCAGAGCCCGTCATTCCTGTCCG |
| 2127 | | CCTCCGTGGGAGACAGAGTGACCATCACTTGTCGGGC |
| | | CAGCTCCTCGGTGTCCTCCATGCATTGGTATCAGCAG |
| | | AAGCCTGGGAAGGCTCCCAAGCCCCTCATCTTCGCCA |
| | | CATCAAATCTTGCCTCCGGGGTGCCAAGCCGGTTCTC |
| | | CGGGAGCGGCTCCGGTACTGAGTACACTCTGACCATT |
| | | TCCTCCTTGCAACCCGAGGACTTTGCCACCTACTACT |
| | | GCCAGCAGTGGATCTTTAACCCGCCGACCTTCGGAGG |
| | | AGGAACCAAAGTGGAGATCAAG |
| SEQ ID NO: | Linker | GGGGSGGGGSGGGGSGGGGS |
| 1010 | | |
| SEQ ID NO: | scFv (VH- | QVQLVQSGAEVKKPGASVKVSCKASGYTFTSYNMHW |
| 2128 | linker-VL) | VRQAPGQGLEWMGAIYPGNGDTSYNPKFKGRVTMTA |
| | | DKSTRTAYMELSSLRSEDTAVYYCARSYFYGSSSWYFD |
| | | VWGQGTTVTVSSGGGGSGGGGSGGGGSGGGGSDIQLT |
| | | QSPSFLSASVGDRVTITCRASSSVSSMHWYQQKPGKAP |
| | | KPLIFATSNLASGVPSRFSGSGSGTEYTLTISSLQPED |
| | | FATYYCQQWIFNPPTFGGGTKVEIK |
| SEQ ID NO: | DNA scFv | CAAGTCCAACTCGTCCAGTCAGGAGCAGAAGTCAAG |
| 2129 | (VH-linker- | AAACCTGGAGCTTCCGTGAAAGTGTCGTGCAAGGCCT |
| | VL) | CCGGCTACACCTTCACCTCTTACAACATGCACTGGGT |
| | | CAGACAGGCCCCTGGTCAAGGACTGGAATGGATGGG |
| | | AGCGATCTACCCGGGCAACGGAGACACTTCGTACAA |
| | | CCCCAAGTTCAAGGGACGGGTCACTATGACCGCCGA |
| | | TAAGAGCACGCGCACCGCGTACATGGAACTGAGCAG |
| | | CCTGCGCTCCGAGGACACTGCCGTGTATTACTGCGCG |
| | | AGGAGCTACTTCTACGGATCATCGTCGTGGTACTTCG |
| | | ACGTCTGGGGCCAGGGCACCACCGTGACCGTGTCATC |
| | | CGGTGGCGGAGGATCGGGGGGCGGAGGAAGCGGCG |
| | | GGGGGGGCTCCGGCGGTGGAGGCTCGGATATTCAGC |
| | | TGACCCAGAGCCCGTCATTCCTGTCCGCCTCCGTGGG |
| | | AGACAGAGTGACCATCACTTGTCGGGCCAGCTCCTCG |
| | | GTGTCCTCCATGCATTGGTATCAGCAGAAGCCTGGGA |
| | | AGGCTCCCAAGCCCCTCATCTTCGCCACATCAAATCT |
| | | TGCCTCCGGGGTGCCAAGCCGGTTCTCCGGGAGCGGC |
| | | TCCGGTACTGAGTACACTCTGACCATTTCCTCCTTGC |
| | | AACCCGAGGACTTTGCCACCTACTACTGCCAGCAGTG |
| | | GATCTTTAACCCGCCGACCTTCGGAGGAGGAACCAA |
| | | AGTGGAGATCAAG |
| SEQ ID NO: | Full CAR | MALPVTALLLPLALLLHAARPQVQLVQSGAEVKKPGAS |
| 2130 | amino acid | VKVSCKASGYTFTSYNMHWVRQAPGQGLEWMGAIYP |
| | sequence | GNGDTSYNPKFKGRVTMTADKSTRTAYMELSSLRSEDT |
| | | AVYYCARSYFYGSSSWYFDVWGQGTTVTVSSGGGGSG |
| | | GGGSGGGGSGGGGSDIQLTQSPSFLSASVGDRVTITCRA |
| | | SSSVSSMHWYQQKPGKAPKPLIFATSNLASGVPSRFSGS |
| | | GSGTEYTLTISSLQPEDFATYYCQQWIFNPPTFGGGTKV |
| | | EIKTTTPAPRPPTPAPTIASQPLSLRPEACRPAAGGAVHT |
| | | RGLDFACDIYIWAPLAGTCGVLLLSLVITLYCKRGRKKL |
| | | LYIFKQPFMRPVQTTQEEDGCSCRFPEEEEGGCELRVKF |
| | | SRSADAPAYQQGQNQLYNELNLGRREEYDVLDKRRGR |
| | | DPEMGGKPRRKNPQEGLYNELQKDKMAEAYSEIGMKG |
| | | ERRRGKGHDGLYQGLSTATKDTYDALHMQALPPR |
| SEQ ID NO: | Full CAR | ATGGCCCTCCCTGTCACCGCCCTGCTGCTTCCGCTGG |
| 2131 | nucleic acid | CTCTTCTGCTCCACGCCGCTCGGCCCCAAGTCCAACT |
| | sequence | CGTCCAGTCAGGAGCAGAAGTCAAGAAACCTGGAGC |
| | | TTCCGTGAAAGTGTCGTGCAAGGCCTCCGGCTACACC |
| | | TTCACCTCTTACAACATGCACTGGGTCAGACAGGCCC |
| | | CTGGTCAAGGACTGGAATGGATGGGAGCGATCTACC |
| | | CGGGCAACGGAGACACTTCGTACAACCCCAAGTTCA |
| | | AGGGACGGGTCACTATGACCGCCGATAAGAGCACGC |
| | | GCACCGCGTACATGGAACTGAGCAGCCTGCGCTCCG |
| | | AGGACACTGCCGTGTATTACTGCGCGAGGAGCTACTT |
| | | CTACGGATCATCGTCGTGGTACTTCGACGTCTGGGGC |
| | | CAGGGCACCACCGTGACCGTGTCATCCGGTGGCGGA |
| | | GGATCGGGGGGCGGAGGAAGCGGCGGGGGGGGCTC |
| | | CGGCGGTGGAGGCTCGGATATTCAGCTGACCCAGAG |
| | | CCCGTCATTCCTGTCCGCCTCCGTGGGAGACAGAGTG |
| | | ACCATCACTTGTCGGGCCAGCTCCTCGGTGTCCTCCA |
| | | TGCATTGGTATCAGCAGAAGCCTGGGAAGGCTCCCA |
| | | AGCCCCTCATCTTCGCCACATCAAATCTTGCCTCCGG |
| | | GGTGCCAAGCCGGTTCTCCGGGAGCGGCTCCGGTACT |
| | | GAGTACACTCTGACCATTTCCTCCTTGCAACCCGAGG |
| | | ACTTTGCCACCTACTACTGCCAGCAGTGGATCTTTAA |
| | | CCCGCCGACCTTCGGAGGAGGAACCAAAGTGGAGAT |
| | | CAAGACCACTACCCCAGCACCGAGGCCACCCACCCC |
| | | GGCTCCTACCATCGCCTCCCAGCCTCTGTCCCTGCGT |
| | | CCGGAGGCATGTAGACCCGCAGCTGGTGGGGCCGTG |
| | | CATACCCGGGGTCTTGACTTCGCCTGCGATATCTACA |
| | | TTTGGGCCCCTCTGGCTGGTACTTGCGGGGTCCTGCT |
| | | GCTTTCACTCGTGATCACTCTTTACTGTAAGCGCGGT |
| | | CGGAAGAAGCTGCTGTACATCTTTAAGCAACCCTTCA |
| | | TGAGGCCTGTGCAGACTACTCAAGAGGAGGACGGCT |
| | | GTTCATGCCGGTTCCCAGAGGAGGAGGAAGGCGGCT |
| | | GCGAACTGCGCGTGAAATTCAGCCGCAGCGCAGATG |
| | | CTCCAGCCTACCAGCAGGGGCAGAACCAGCTCTACA |
| | | ACGAACTCAATCTTGGTCGGAGAGAGGAGTACGACG |
| | | TGCTGGACAAGCGGAGAGGACGGGACCCAGAAATGG |
| | | GCGGGAAGCCGCGCAGAAAGAATCCCCAAGAGGGCC |
| | | TGTACAACGAGCTCCAAAAGGATAAGATGGCAGAAG |
| | | CCTATAGCGAGATTGGTATGAAAGGGGAACGCAGAA |
| | | GAGGCAAAGGCCACGACGGACTGTACCAGGGACTCA |
| | | GCACCGCCACCAAGGACACCTATGACGCTCTTCACAT |
| | | GCAGGCCCTGCCGCCTCGG |
| CD20-C5H3 | | |
| SEQ ID NO: | HCDR1 | SYNMH |
| 2043 (Kabat) | | |
| SEQ ID NO: | HCDR2 | AIYPGNGDTSYNPKFKG |
| 2044 (Kabat) | | |
| SEQ ID NO: | HCDR3 | SYFYGSSSWYFDV |
| 2045 (Kabat) | | |
| SEQ ID NO: | HCDR1 | GYTFTSY |
| 2046 (Chothia) | | |
| SEQ ID NO: | HCDR2 | YPGNGD |
| 2047 (Chothia) | | |
| SEQ ID NO: | HCDR3 | SYFYGSSSWYFDV |
| 2045 (Chothia) | | |
| SEQ ID NO: | HCDR1 | GYTFTSYN |
| 2048 (IMGT) | | |
| SEQ ID NO: | HCDR2 | IYPGNGDT |
| 2049 (IMGT) | | |
| SEQ ID NO: | HCDR3 | ARSYFYGSSSWYFDV |
| 2050 (IMGT) | | |
| SEQ ID NO: | HCDR1 | GYTFTSYNMH |
| 2051 (Combined | | |
| Chothia and | | |
| Kabat) | | |
| SEQ ID NO: | HCDR2 | AIYPGNGDTSYNPKFKG |
| 2044 (Combined | | |
| Chothia and | | |
| Kabat) | | |
| SEQ ID NO: | HCDR3 | SYFYGSSSWYFDV |
| 2045 (Combined | | |
| Chothia and | | |
| Kabat) | | |
| SEQ ID NO: | VH | QVQLVQSGAEVKKPGSSVKVSCKASGYTFTSYNMHWV |
| 2132 | | RQAPGQGLEWMGAIYPGNGDTSYNPKFKGRVTITADK |
| | | STRTAYMELSSLRSEDTAVYYCARSYFYGSSSWYFDV |
| | | WGQGTTVTVSS |
| SEQ ID NO: | DNA VH | CAAGTGCAACTCGTCCAGTCCGGTGCAGAAGTCAAG |
| 2133 | | AAGCCTGGTTCATCGGTGAAAGTGTCCTGCAAAGCGT |
| | | CGGGCTACACCTTCACCTCGTACAACATGCACTGGGT |
| | | CCGCCAGGCCCCCGGACAAGGACTGGAATGGATGGG |
| | | TGCTATCTACCCCGGAAACGGAGATACCAGCTACAA |
| | | CCCCAAGTTCAAGGGACGCGTGACCATTACTGCCGAC |
| | | AAGTCCACAAGAACCGCCTACATGGAACTGTCCAGC |
| | | CTGAGATCCGAGGACACTGCGGTGTACTACTGTGCGA |
| | | GGTCCTACTTCTACGGGTCCTCCTCTTGGTACTTCGAC |
| | | GTCTGGGGACAGGGCACTACTGTGACCGTGTCCAGC |
| SEQ ID NO: | LCDR1 | RASSSVSSMH |
| 2054 (Kabat) | | |
| SEQ ID NO: | LCDR2 | ATSNLAS |
| 2031 (Kabat) | | |
| SEQ ID NO: | LCDR3 | QQWIFNPPT |
| 2055 (Kabat) | | |
| SEQ ID NO: | LCDR1 | SSSVSS |
| 2056 (Chothia) | | |
| SEQ ID NO: | LCDR2 | ATS |
| 2034 (Chothia) | | |
| SEQ ID NO: | LCDR3 | WIFNPP |
| 2057 (Chothia) | | |
| SEQ ID NO: | LCDR1 | SSVSS |
| 2036 (IMGT) | | |
| SEQ ID NO: | LCDR2 | ATS |
| 2034 (IMGT) | | |
| SEQ ID NO: | LCDR3 | QQWIFNPPT |
| 2055 (IMGT) | | |
| SEQ ID NO: | LCDR1 | RASSSVSSMH |
| 2054 (Combined | | |
| Chothia and | | |
| Kabat) | | |
| SEQ ID NO: | LCDR2 | ATSNLAS |
| 2031 (Combined | | |
| Chothia and | | |
| Kabat) | | |
| SEQ ID NO: | LCDR3 | QQWIFNPPT |
| 2055 (Combined | | |
| Chothia and | | |
| Kabat) | | |
| SEQ ID NO: | VL | EIVLTQSPATLSLSPGERATLSCRASSSVSSMHWYQQKP |
| 2058 | | GQAPRPLIFATSNLASGIPARFSGSGSGTDYTLTISSLE |
| | | PEDAAVYYCQQWIFNPPTFGGGTKVEIK |
| SEQ ID NO: | DNA VL | GAGATCGTGCTGACGCAGTCGCCGGCCACCCTGAGC |
| 2134 | | CTTTCACCGGGAGAACGCGCCACTCTGTCATGCCGGG |
| | | CCAGCAGCTCCGTGTCCTCCATGCATTGGTACCAGCA |
| | | GAAGCCGGGGCAGGCCCCGCGGCCTCTCATCTTCGCC |
| | | ACCTCCAATCTGGCCTCCGGCATCCCTGCTCGGTTTA |
| | | GCGGAAGCGGCAGCGGAACTGACTATACCTTGACCA |
| | | TCTCCTCGCTGGAACCAGAGGATGCAGCCGTGTACTA |
| | | TTGCCAGCAGTGGATCTTCAACCCGCCAACCTTCGGC |
| | | GGCGGCACCAAGGTCGAGATTAAG |
| SEQ ID NO: | Linker | GGGGSGGGGSGGGGSGGGGS |
| 1010 | | |
| SEQ ID NO: | scFv (VH- | QVQLVQSGAEVKKPGSSVKVSCKASGYTFTSYNMHWV |
| 2135 | linker-VL) | RQAPGQGLEWMGAIYPGNGDTSYNPKFKGRVTITADK |
| | | STRTAYMELSSLRSEDTAVYYCARSYFYGSSSWYFDV |
| | | WGQGTTVTVSSGGGGSGGGGSGGGGSGGGGSEIVLTQ |
| | | SPATLSLSPGERATLSCRASSSVSSMHWYQQKPGQAPRP |
| | | LIFATSNLASGIPARFSGSGSGTDYTLTISSLEPEDAAVY |
| | | YCQQWIFNPPTFGGGTKVEIK |
| SEQ ID NO: | DNA scFv | CAAGTGCAACTCGTCCAGTCCGGTGCAGAAGTCAAG |
| 2136 | (VH-linker- | AAGCCTGGTTCATCGGTGAAAGTGTCCTGCAAAGCGT |
| | VL) | CGGGCTACACCTTCACCTCGTACAACATGCACTGGGT |
| | | CCGCCAGGCCCCCGGACAAGGACTGGAATGGATGGG |
| | | TGCTATCTACCCCGGAAACGGAGATACCAGCTACAA |
| | | CCCCAAGTTCAAGGGACGCGTGACCATTACTGCCGAC |
| | | AAGTCCACAAGAACCGCCTACATGGAACTGTCCAGC |
| | | CTGAGATCCGAGGACACTGCGGTGTACTACTGTGCGA |
| | | GGTCCTACTTCTACGGGTCCTCCTCTTGGTACTTCGAC |
| | | GTCTGGGGACAGGGCACTACTGTGACCGTGTCCAGC |
| | | GGGGGAGGCGGTAGCGGGGGGGGTGGATCGGGCGG |
| | | CGGCGGATCAGGAGGAGGAGGGTCCGAGATCGTGCT |
| | | GACGCAGTCGCCGGCCACCCTGAGCCTTTCACCGGGA |
| | | GAACGCGCCACTCTGTCATGCCGGGCCAGCAGCTCCG |
| | | TGTCCTCCATGCATTGGTACCAGCAGAAGCCGGGGCA |
| | | GGCCCCGCGGCCTCTCATCTTCGCCACCTCCAATCTG |
| | | GCCTCCGGCATCCCTGCTCGGTTTAGCGGAAGCGGCA |
| | | GCGGAACTGACTATACCTTGACCATCTCCTCGCTGGA |
| | | ACCAGAGGATGCAGCCGTGTACTATTGCCAGCAGTG |
| | | GATCTTCAACCCGCCAACCTTCGGCGGCGGCACCAAG |
| | | GTCGAGATTAAG |
| SEQ ID NO: | Full CAR | MALPVTALLLPLALLLHAARPQVQLVQSGAEVKKPGSS |
| 2137 | amino acid | VKVSCKASGYTFTSYNMHWVRQAPGQGLEWMGAIYP |
| | sequence | GNGDTSYNPKFKGRVTITADKSTRTAYMELSSLRSEDT |
| | | AVYYCARSYFYGSSSWYFDVWGQGTTVTVSSGGGGSG |
| | | GGGSGGGGSGGGGSEIVLTQSPATLSLSPGERATLSCRA |
| | | SSSVSSMHWYQQKPGQAPRPLIFATSNLASGIPARFSGS |
| | | GSGTDYTLTISSLEPEDAAVYYCQQWIFNPPTFGGGTKV |
| | | EIKTTTPAPRPPTPAPTIASQPLSLRPEACRPAAGGAVHT |
| | | RGLDFACDIYIWAPLAGTCGVLLLSLVITLYCKRGRKKL |
| | | LYIFKQPFMRPVQTTQEEDGCSCRFPEEEEGGCELRVKF |
| | | SRSADAPAYQQGQNQLYNELNLGRREEYDVLDKRRGR |
| | | DPEMGGKPRRKNPQEGLYNELQKDKMAEAYSEIGMKG |
| | | ERRRGKGHDGLYQGLSTATKDTYDALHMQALPPR |
| SEQ ID NO: | Full CAR | ATGGCCCTCCCTGTCACCGCCCTGCTGCTTCCGCTGG |
| 2138 | nucleic acid | CTCTTCTGCTCCACGCCGCTCGGCCCCAAGTGCAACT |
| | sequence | CGTCCAGTCCGGTGCAGAAGTCAAGAAGCCTGGTTC |
| | | ATCGGTGAAAGTGTCCTGCAAAGCGTCGGGCTACAC |
| | | CTTCACCTCGTACAACATGCACTGGGTCCGCCAGGCC |
| | | CCCGGACAAGGACTGGAATGGATGGGTGCTATCTAC |
| | | CCCGGAAACGGAGATACCAGCTACAACCCCAAGTTC |
| | | AAGGGACGCGTGACCATTACTGCCGACAAGTCCACA |
| | | AGAACCGCCTACATGGAACTGTCCAGCCTGAGATCC |
| | | GAGGACACTGCGGTGTACTACTGTGCGAGGTCCTACT |
| | | TCTACGGGTCCTCCTCTTGGTACTTCGACGTCTGGGG |
| | | ACAGGGCACTACTGTGACCGTGTCCAGCGGGGGAGG |
| | | CGGTAGCGGGGGGGGTGGATCGGGCGGCGGCGGATC |
| | | AGGAGGAGGAGGGTCCGAGATCGTGCTGACGCAGTC |
| | | GCCGGCCACCCTGAGCCTTTCACCGGGAGAACGCGC |
| | | CACTCTGTCATGCCGGGCCAGCAGCTCCGTGTCCTCC |
| | | ATGCATTGGTACCAGCAGAAGCCGGGGCAGGCCCCG |
| | | CGGCCTCTCATCTTCGCCACCTCCAATCTGGCCTCCG |
| | | GCATCCCTGCTCGGTTTAGCGGAAGCGGCAGCGGAA |
| | | CTGACTATACCTTGACCATCTCCTCGCTGGAACCAGA |
| | | GGATGCAGCCGTGTACTATTGCCAGCAGTGGATCTTC |
| | | AACCCGCCAACCTTCGGCGGCGGCACCAAGGTCGAG |
| | | ATTAAGACCACTACCCCAGCACCGAGGCCACCCACC |
| | | CCGGCTCCTACCATCGCCTCCCAGCCTCTGTCCCTGC |
| | | GTCCGGAGGCATGTAGACCCGCAGCTGGTGGGGCCG |
| | | TGCATACCCGGGGTCTTGACTTCGCCTGCGATATCTA |
| | | CATTTGGGCCCCTCTGGCTGGTACTTGCGGGGTCCTG |
| | | CTGCTTTCACTCGTGATCACTCTTTACTGTAAGCGCG |
| | | GTCGGAAGAAGCTGCTGTACATCTTTAAGCAACCCTT |
| | | CATGAGGCCTGTGCAGACTACTCAAGAGGAGGACGG |
| | | CTGTTCATGCCGGTTCCCAGAGGAGGAGGAAGGCGG |
| | | CTGCGAACTGCGCGTGAAATTCAGCCGCAGCGCAGA |
| | | TGCTCCAGCCTACCAGCAGGGGCAGAACCAGCTCTA |
| | | CAACGAACTCAATCTTGGTCGGAGAGAGGAGTACGA |
| | | CGTGCTGGACAAGCGGAGAGGACGGGACCCAGAAAT |
| | | GGGCGGGAAGCCGCGCAGAAAGAATCCCCAAGAGG |
| | | GCCTGTACAACGAGCTCCAAAAGGATAAGATGGCAG |
| | | AAGCCTATAGCGAGATTGGTATGAAAGGGGAACGCA |
| | | GAAGAGGCAAAGGCCACGACGGACTGTACCAGGGAC |
| | | TCAGCACCGCCACCAAGGACACCTATGACGCTCTTCA |
| | | CATGCAGGCCCTGCCGCCTCGG |
| CD20-C5H4 | | |
| SEQ ID NO: | HCDR1 | SYNMH |
| 2043 (Kabat) | | |
| SEQ ID NO: | HCDR2 | AIYPGNGDTSYNPKFKG |
| 2044 (Kabat) | | |
| SEQ ID NO: | HCDR3 | SYFYGSSSWYFDV |
| 2045 (Kabat) | | |
| SEQ ID NO: | HCDR1 | GYTFTSY |
| 2046 (Chothia) | | |
| SEQ ID NO: | HCDR2 | YPGNGD |
| 2047 (Chothia) | | |
| SEQ ID NO: | HCDR3 | SYFYGSSSWYFDV |
| 2045 (Chothia) | | |
| SEQ ID NO: | HCDR1 | GYTFTSYN |
| 2048 (IMGT) | | |
| SEQ ID NO: | HCDR2 | TYPGNGDT |
| 2049 (IMGT) | | |
| SEQ ID NO: | HCDR3 | ARSYFYGSSSWYFDV |
| 2050 (IMGT) | | |
| SEQ ID NO: | HCDR1 | GYTFTSYNMH |
| 2051 (Combined | | |
| Chothia and | | |
| Kabat) | | |
| SEQ ID NO: | HCDR2 | AIYPGNGDTSYNPKFKG |
| 2044 (Combined | | |
| Chothia and | | |
| Kabat) | | |
| SEQ ID NO: | HCDR3 | SYFYGSSSWYFDV |
| 2045 (Combined | | |
| Chothia and | | |
| Kabat) | | |
| SEQ ID NO: | VH | QVQLVQSGAEVKKPGSSVKVSCKASGYTFTSYNMHWV |
| 2132 | | RQAPGQGLEWMGAIYPGNGDTSYNPKFKGRVTITADK |
| | | STRTAYMELSSLRSEDTAVYYCARSYFYGSSSWYFDV |
| | | WGQGTTVTVSS |
| SEQ ID NO: | DNA VH | CAAGTGCAACTCGTCCAGTCCGGTGCAGAAGTCAAG |
| 2139 | | AAGCCAGGTTCCTCGGTGAAAGTGTCCTGCAAAGCCT |
| | | CGGGTTACACCTTCACCTCGTACAATATGCACTGGGT |
| | | CCGCCAAGCTCCGGGACAAGGCCTGGAATGGATGGG |
| | | AGCGATCTACCCCGGAAACGGCGACACGTCCTACAA |
| | | CCCGAAGTTCAAGGGAAGAGTGACCATCACCGCCGA |
| | | CAAGTCCACCCGCACCGCGTACATGGAGCTTAGCAG |
| | | CCTGCGGAGCGAGGACACTGCCGTGTATTACTGCGCC |
| | | CGGTCCTACTTCTATGGATCATCCTCGTGGTACTTCG |
| | | ATGTCTGGGGCCAGGGGACCACCGTGACCGTGTCCA |
| | | GC |
| SEQ ID NO: | LCDR1 | RASSSVSSMH |
| 2054 (Kabat) | | |
| SEQ ID NO: | LCDR2 | ATSNLAS |
| 2031 (Kabat) | | |
| SEQ ID NO: | LCDR3 | QQWIFNPPT |
| 2055 (Kabat) | | |
| SEQ ID NO: | LCDRI | SSSVSS |
| 2056 (Chothia) | | |
| SEQ ID NO: | LCDR2 | ATS |
| 2034 (Chothia) | | |
| SEQ ID NO: | LCDR3 | WIFNPP |
| 2057 (Chothia) | | |
| SEQ ID NO: | LCDR1 | SSVSS |
| 2036 (IMGT) | | |
| SEQ ID NO: | LCDR2 | ATS |
| 2034 (IMGT) | | |
| SEQ ID NO: | LCDR3 | QQWIFNPPT |
| 2055 (IMGT) | | |
| SEQ ID NO: | LCDR1 | RASSSVSSMH |
| 2054 (Combined | | |
| Chothia and | | |
| Kabat) | | |
| SEQ ID NO: | LCDR2 | ATSNLAS |
| 2031 (Combined | | |
| Chothia and | | |
| Kabat) | | |
| SEQ ID NO: | LCDR3 | QQWIFNPPT |
| 2055 (Combined | | |
| Chothia and | | |
| Kabat) | | |
| SEQ ID NO: | VL | DIQLTQSPSFLSASVGDRVTITCRASSSVSSMHWYQQKP |
| 2126 | | GKAPKPLIFATSNLASGVPSRFSGSGSGTEYTLTISSLQPE |
| | | DFATYYCQQWIFNPPTFGGGTKVEIK |
| SEQ ID NO: | DNA VL | GATATCCAGCTGACCCAGAGCCCTTCCTTCCTGTCCG |
| 2140 | | CTTCCGTGGGAGACAGAGTCACTATTACTTGTCGGGC |
| | | CTCCTCATCCGTGTCATCCATGCACTGGTACCAGCAG |
| | | AAGCCGGGAAAGGCCCCAAAGCCCTTGATCTTTGCC |
| | | ACTTCCAACCTGGCATCCGGCGTGCCCTCGAGGTTCT |
| | | CCGGGAGCGGTTCAGGGACCGAGTACACTCTGACCA |
| | | TTAGCAGCCTCCAGCCTGAGGACTTTGCCACCTACTA |
| | | CTGCCAGCAGTGGATTTTCAACCCGCCTACATTCGGA |
| | | GGGGGCACTAAGGTCGAAATCAAG |
| SEQ ID NO: | Linker | GGGGSGGGGSGGGGSGGGGS |
| 1010 | | |
| SEQ ID NO: | scFv (VH- | QVQLVQSGAEVKKPGSSVKVSCKASGYTFTSYNMHWV |
| 2141 | linker-VL) | RQAPGQGLEWMGAIYPGNGDTSYNPKFKGRVTITADK |
| | | STRTAYMELSSLRSEDTAVYYCARSYFYGSSSWYFDV |
| | | WGQGTTVTVSSGGGGSGGGGSGGGGSGGGGSDIQLTQ |
| | | SPSFLSASVGDRVTITCRASSSVSSMHWYQQKPGKAPKP |
| | | LIFATSNLASGVPSRFSGSGSGTEYTLTISSLQPEDFATY |
| | | YCQQWIFNPPTFGGGTKVEIK |
| SEQ ID NO: | DNA scFv | CAAGTGCAACTCGTCCAGTCCGGTGCAGAAGTCAAG |
| 2142 | (VH-linker- | AAGCCAGGTTCCTCGGTGAAAGTGTCCTGCAAAGCCT |
| | VL) | CGGGTTACACCTTCACCTCGTACAATATGCACTGGGT |
| | | CCGCCAAGCTCCGGGACAAGGCCTGGAATGGATGGG |
| | | AGCGATCTACCCCGGAAACGGCGACACGTCCTACAA |
| | | CCCGAAGTTCAAGGGAAGAGTGACCATCACCGCCGA |
| | | CAAGTCCACCCGCACCGCGTACATGGAGCTTAGCAG |
| | | CCTGCGGAGCGAGGACACTGCCGTGTATTACTGCGCC |
| | | CGGTCCTACTTCTATGGATCATCCTCGTGGTACTTCG |
| | | ATGTCTGGGGCCAGGGGACCACCGTGACCGTGTCCA |
| | | GCGGTGGCGGAGGCAGCGGCGGAGGAGGGTCTGGAG |
| | | GAGGCGGCTCGGGGGGAGGGGGCTCGGATATCCAGC |
| | | TGACCCAGAGCCCTTCCTTCCTGTCCGCTTCCGTGGG |
| | | AGACAGAGTCACTATTACTTGTCGGGCCTCCTCATCC |
| | | GTGTCATCCATGCACTGGTACCAGCAGAAGCCGGGA |
| | | AAGGCCCCAAAGCCCTTGATCTTTGCCACTTCCAACC |
| | | TGGCATCCGGCGTGCCCTCGAGGTTCTCCGGGAGCGG |
| | | TTCAGGGACCGAGTACACTCTGACCATTAGCAGCCTC |
| | | CAGCCTGAGGACTTTGCCACCTACTACTGCCAGCAGT |
| | | GGATTTTCAACCCGCCTACATTCGGAGGGGGCACTAA |
| | | GGTCGAAATCAAG |
| SEQ ID NO: | Full CAR | MALPVTALLLPLALLLHAARPQVQLVQSGAEVKKPGSS |
| 2143 | amino acid | VKVSCKASGYTFTSYNMHWVRQAPGQGLEWMGAIYP |
| | sequence | GNGDTSYNPKFKGRVTITADKSTRTAYMELSSLRSEDT |
| | | AVYYCARSYFYGSSSWYFDVWGQGTTVTVSSGGGGSG |
| | | GGGSGGGGSGGGGSDIQLTQSPSFLSASVGDRVTITCRA |
| | | SSSVSSMHWYQQKPGKAPKPLIFATSNLASGVPSRFSGS |
| | | GSGTEYTLTISSLQPEDFATYYCQQWIFNPPTFGGGTKV |
| | | EIKTTTPAPRPPTPAPTIASQPLSLRPEACRPAAGGAVHT |
| | | RGLDFACDIYIWAPLAGTCGVLLLSLVITLYCKRGRKKL |
| | | LYIFKQPFMRPVQTTQEEDGCSCRFPEEEEGGCELRVKF |
| | | SRSADAPAYQQGQNQLYNELNLGRREEYDVLDKRRGR |
| | | DPEMGGKPRRKNPQEGLYNELQKDKMAEAYSEIGMKG |
| | | ERRRGKGHDGLYQGLSTATKDTYDALHMQALPPR |
| SEQ ID NO: | Full CAR | ATGGCCCTCCCTGTCACCGCCCTGCTGCTTCCGCTGG |
| 2144 | nucleic acid | CTCTTCTGCTCCACGCCGCTCGGCCCCAAGTGCAACT |
| | sequence | CGTCCAGTCCGGTGCAGAAGTCAAGAAGCCAGGTTC |
| | | CTCGGTGAAAGTGTCCTGCAAAGCCTCGGGTTACACC |
| | | TTCACCTCGTACAATATGCACTGGGTCCGCCAAGCTC |
| | | CGGGACAAGGCCTGGAATGGATGGGAGCGATCTACC |
| | | CCGGAAACGGCGACACGTCCTACAACCCGAAGTTCA |
| | | AGGGAAGAGTGACCATCACCGCCGACAAGTCCACCC |
| | | GCACCGCGTACATGGAGCTTAGCAGCCTGCGGAGCG |
| | | AGGACACTGCCGTGTATTACTGCGCCCGGTCCTACTT |
| | | CTATGGATCATCCTCGTGGTACTTCGATGTCTGGGGC |
| | | CAGGGGACCACCGTGACCGTGTCCAGCGGTGGCGGA |
| | | GGCAGCGGCGGAGGAGGGTCTGGAGGAGGCGGCTCG |
| | | GGGGGAGGGGGCTCGGATATCCAGCTGACCCAGAGC |
| | | CCTTCCTTCCTGTCCGCTTCCGTGGGAGACAGAGTCA |
| | | CTATTACTTGTCGGGCCTCCTCATCCGTGTCATCCATG |
| | | CACTGGTACCAGCAGAAGCCGGGAAAGGCCCCAAAG |
| | | CCCTTGATCTTTGCCACTTCCAACCTGGCATCCGGCG |
| | | TGCCCTCGAGGTTCTCCGGGAGCGGTTCAGGGACCGA |
| | | GTACACTCTGACCATTAGCAGCCTCCAGCCTGAGGAC |
| | | TTTGCCACCTACTACTGCCAGCAGTGGATTTTCAACC |
| | | CGCCTACATTCGGAGGGGGCACTAAGGTCGAAATCA |
| | | AGACCACTACCCCAGCACCGAGGCCACCCACCCCGG |
| | | CTCCTACCATCGCCTCCCAGCCTCTGTCCCTGCGTCCG |
| | | GAGGCATGTAGACCCGCAGCTGGTGGGGCCGTGCAT |
| | | ACCCGGGGTCTTGACTTCGCCTGCGATATCTACATTT |
| | | GGGCCCCTCTGGCTGGTACTTGCGGGGTCCTGCTGCT |
| | | TTCACTCGTGATCACTCTTTACTGTAAGCGCGGTCGG |
| | | AAGAAGCTGCTGTACATCTTTAAGCAACCCTTCATGA |
| | | GGCCTGTGCAGACTACTCAAGAGGAGGACGGCTGTT |
| | | CATGCCGGTTCCCAGAGGAGGAGGAAGGCGGCTGCG |
| | | AACTGCGCGTGAAATTCAGCCGCAGCGCAGATGCTC |
| | | CAGCCTACCAGCAGGGGCAGAACCAGCTCTACAACG |
| | | AACTCAATCTTGGTCGGAGAGAGGAGTACGACGTGC |
| | | TGGACAAGCGGAGAGGACGGGACCCAGAAATGGGC |
| | | GGGAAGCCGCGCAGAAAGAATCCCCAAGAGGGCCTG |
| | | TACAACGAGCTCCAAAAGGATAAGATGGCAGAAGCC |
| | | TATAGCGAGATTGGTATGAAAGGGGAACGCAGAAGA |
| | | GGCAAAGGCCACGACGGACTGTACCAGGGACTCAGC |
| | | ACCGCCACCAAGGACACCTATGACGCTCTTCACATGC |
| | | AGGCCCTGCCGCCTCGG |
| CD20-C8H1 | | |
| SEQ ID NO: | HCDR1 | RYNMH |
| 2145 (Kabat) | | |
| SEQ ID NO: | HCDR2 | AIYPGNGDTSYSQKFKG |
| 2146 (Kabat) | | |
| SEQ ID NO: | HCDR3 | SFFYGSSDWYFDV |
| 2147 (Kabat) | | |
| SEQ ID NO: | HCDR1 | GYTFTRY |
| 2148 (Chothia) | | |
| SEQ ID NO: | HCDR2 | YPGNGD |
| 2047 (Chothia) | | |
| SEQ ID NO: | HCDR3 | SFFYGSSDWYFDV |
| 2147 (Chothia) | | |
| SEQ ID NO: | HCDR1 | GYTFTRYN |
| 2149 (IMGT) | | |
| SEQ ID NO: | HCDR2 | IYPGNGDT |
| 2049 (IMGT) | | |
| SEQ ID NO: | HCDR3 | ARSFFYGSSDWYFDV |
| 2150 (IMGT) | | |
| SEQ ID NO: | HCDR1 | GYTFTRYNMH |
| 2151 (Combined | | |
| Chothia and | | |
| Kabat | | |
| SEQ ID NO: | HCDR2 | AIYPGNGDTSYSQKFKG |
| 2146 (Combined | | |
| Chothia and | | |
| Kabat | | |
| SEQ ID NO: | HCDR3 | SFFYGSSDWYFDV |
| 2147 (Combined | | |
| Chothia and | | |
| Kabat) | | |
| SEQ ID NO: | VH | QVQLVQSGAEVKKPGASVKVSCKASGYTFTRYNMHW |
| 2152 | | VRQAPGQRLEWMGAIYPGNGDTSYSQKFKGRVTITAD |
| | | KSASTAYMELSSLRSEDTAVYYCARSFFYGSSDWYFDV |
| | | WGQGTTVTVSS |
| SEQ ID NO: | DNA VH | CAAGTCCAACTCGTCCAGTCAGGAGCAGAAGTCAAG |
| 2153 | | AAACCAGGAGCATCCGTGAAAGTGTCGTGCAAAGCC |
| | | TCTGGCTACACCTTCACCCGGTACAACATGCACTGGG |
| | | TCAGACAGGCCCCGGGACAGCGGCTCGAGTGGATGG |
| | | GTGCCATCTACCCCGGCAACGGGGACACCTCCTACTC |
| | | CCAAAAGTTCAAGGGTCGCGTGACCATCACGGCGGA |
| | | TAAGTCGGCCAGCACTGCGTACATGGAATTGTCATCC |
| | | CTGCGCTCCGAGGATACCGCCGTGTATTACTGCGCGC |
| | | GGTCCTTCTTCTACGGCTCCTCCGATTGGTACTTCGAC |
| | | GTCTGGGGACAGGGAACTACCGTGACCGTGTCCTCC |
| SEQ ID NO: | LCDR1 | RASSSVNNMH |
| 2154 (Kabat) | | |
| SEQ ID NO: | LCDR2 | ATSNLAS |
| 2031 (Kabat) | | |
| SEQ ID NO: | LCDR3 | QQWIFNPPT |
| 2055 (Kabat) | | |
| SEQ ID NO: | LCDR1 | SSSVNN |
| 2155 (Chothia) | | |
| SEQ ID NO: | LCDR2 | ATS |
| 2034 (Chothia) | | |
| SEQ ID NO: | LCDR3 | WIFNPP |
| 2057 (Chothia) | | |
| SEQ ID NO: | LCDR1 | SSVNN |
| 2156 (IMGT) | | |
| SEQ ID NO: | LCDR2 | ATS |
| 2034 (IMGT) | | |
| SEQ ID NO: | LCDR3 | QQWIFNPPT |
| 2055 (IMGT) | | |
| SEQ ID NO: | LCDR1 | RASSSVNNMH |
| 2154 (Combined | | |
| Chothia and | | |
| Kabat) | | |
| SEQ ID NO: | LCDR2 | ATSNLAS |
| 2031 (Combined | | |
| Chothia and | | |
| Kabat) | | |
| SEQ ID NO: | LCDR3 | QQWIFNPPT |
| 2055 (Combined | | |
| Chothia and | | |
| Kabat | | |
| SEQ ID NO: | VL | EIVLTQSPDFQSVTPKEKVTITCRASSSVNNMHWYQQK |
| 2157 | | PDQSPKPLIYATSNLASGVPSRFSGSGSGTDYTLTINSLE |
| | | AEDAATYYCQQWIFNPPTFGQGTKLEIK |
| SEQ ID NO: | DNA VL | GAAATCGTGCTGACTCAGTCGCCGGACTTCCAAAGCG |
| 2158 | | TGACCCCAAAGGAGAAGGTCACCATCACCTGTAGAG |
| | | CCTCATCGTCCGTGAACAATATGCACTGGTACCAGCA |
| | | GAAGCCGGACCAGTCCCCTAAGCCCCTGATCTACGCC |
| | | ACTTCCAACCTGGCCTCCGGCGTGCCGTCGAGGTTCA |
| | | GCGGCTCGGGCAGCGGGACCGACTACACCCTGACCA |
| | | TCAACAGCCTTGAAGCTGAGGACGCCGCTACCTACTA |
| | | CTGCCAGCAGTGGATTTTCAACCCTCCCACATTTGGA |
| | | CAGGGCACTAAGCTGGAGATTAAG |
| SEQ ID NO: | Linker | GGGGSGGGGSGGGGSGGGGS |
| 1010 | | |
| SEQ ID NO: | scFv (VH- | QVQLVQSGAEVKKPGASVKVSCKASGYTFTRYNMHW |
| 2159 | linker-VL) | VRQAPGQRLEWMGAIYPGNGDTSYSQKFKGRVTITAD |
| | | KSASTAYMELSSLRSEDTAVYYCARSFFYGSSDWYFDV |
| | | WGQGTTVTVSSGGGGSGGGGSGGGGSGGGGSEIVLTQ |
| | | SPDFQSVTPKEKVTITCRASSSVNNMHWYQQKPDQSPK |
| | | PLIYATSNLASGVPSRFSGSGSGTDYTLTINSLEAEDAAT |
| | | YYCQQWIFNPPTFGQGTKLEIK |
| SEQ ID NO: | DNA scFv | CAAGTCCAACTCGTCCAGTCAGGAGCAGAAGTCAAG |
| 2160 | (VH-linker- | AAACCAGGAGCATCCGTGAAAGTGTCGTGCAAAGCC |
| | VL | TCTGGCTACACCTTCACCCGGTACAACATGCACTGGG |
| | | TCAGACAGGCCCCGGGACAGCGGCTCGAGTGGATGG |
| | | GTGCCATCTACCCCGGCAACGGGGACACCTCCTACTC |
| | | CCAAAAGTTCAAGGGTCGCGTGACCATCACGGCGGA |
| | | TAAGTCGGCCAGCACTGCGTACATGGAATTGTCATCC |
| | | CTGCGCTCCGAGGATACCGCCGTGTATTACTGCGCGC |
| | | GGTCCTTCTTCTACGGCTCCTCCGATTGGTACTTCGAC |
| | | GTCTGGGGACAGGGAACTACCGTGACCGTGTCCTCCG |
| | | GGGGTGGCGGGAGCGGAGGGGGCGGAAGCGGGGGT |
| | | GGAGGATCAGGAGGCGGAGGCTCCGAAATCGTGCTG |
| | | ACTCAGTCGCCGGACTTCCAAAGCGTGACCCCAAAG |
| | | GAGAAGGTCACCATCACCTGTAGAGCCTCATCGTCCG |
| | | TGAACAATATGCACTGGTACCAGCAGAAGCCGGACC |
| | | AGTCCCCTAAGCCCCTGATCTACGCCACTTCCAACCT |
| | | GGCCTCCGGCGTGCCGTCGAGGTTCAGCGGCTCGGGC |
| | | AGCGGGACCGACTACACCCTGACCATCAACAGCCTT |
| | | GAAGCTGAGGACGCCGCTACCTACTACTGCCAGCAG |
| | | TGGATTTTCAACCCTCCCACATTTGGACAGGGCACTA |
| | | AGCTGGAGATTAAG |
| SEQ ID NO: | Full CAR | MALPVTALLLPLALLLHAARPQVQLVQSGAEVKKPGAS |
| 2161 | amino acid | VKVSCKASGYTFTRYNMHWVRQAPGQRLEWMGAIYP |
| | sequence | GNGDTSYSQKFKGRVTITADKSASTAYMELSSLRSEDT |
| | | AVYYCARSFFYGSSDWYFDVWGQGTTVTVSSGGGGSG |
| | | GGGSGGGGSGGGGSEIVLTQSPDFQSVTPKEKVTITCRA |
| | | SSSVNNMHWYQQKPDQSPKPLIYATSNLASGVPSRFSG |
| | | SGSGTDYTLTINSLEAEDAATYYCQQWIFNPPTFGQGTK |
| | | LEIKTTTPAPRPPTPAPTIASQPLSLRPEACRPAAGGAVH |
| | | TRGLDFACDIYIWAPLAGTCGVLLLSLVITLYCKRGRKK |
| | | LLYIFKQPFMRPVQTTQEEDGCSCRFPEEEEGGCELRVK |
| | | FSRSADAPAYQQGQNQLYNELNLGRREEYDVLDKRRG |
| | | RDPEMGGKPRRKNPQEGLYNELQKDKMAEAYSEIGMK |
| | | GERRRGKGHDGLYQGLSTATKDTYDALHMQALPPR |
| SEQ ID NO: | Full CAR | ATGGCCCTCCCTGTCACCGCCCTGCTGCTTCCGCTGG |
| 2162 | nucleic acid | CTCTTCTGCTCCACGCCGCTCGGCCCCAAGTCCAACT |
| | sequence | CGTCCAGTCAGGAGCAGAAGTCAAGAAACCAGGAGC |
| | | ATCCGTGAAAGTGTCGTGCAAAGCCTCTGGCTACACC |
| | | TTCACCCGGTACAACATGCACTGGGTCAGACAGGCCC |
| | | CGGGACAGCGGCTCGAGTGGATGGGTGCCATCTACC |
| | | CCGGCAACGGGGACACCTCCTACTCCCAAAAGTTCA |
| | | AGGGTCGCGTGACCATCACGGCGGATAAGTCGGCCA |
| | | GCACTGCGTACATGGAATTGTCATCCCTGCGCTCCGA |
| | | GGATACCGCCGTGTATTACTGCGCGCGGTCCTTCTTC |
| | | TACGGCTCCTCCGATTGGTACTTCGACGTCTGGGGAC |
| | | AGGGAACTACCGTGACCGTGTCCTCCGGGGGTGGCG |
| | | GGAGCGGAGGGGGCGGAAGCGGGGGTGGAGGATCA |
| | | GGAGGCGGAGGCTCCGAAATCGTGCTGACTCAGTCG |
| | | CCGGACTTCCAAAGCGTGACCCCAAAGGAGAAGGTC |
| | | ACCATCACCTGTAGAGCCTCATCGTCCGTGAACAATA |
| | | TGCACTGGTACCAGCAGAAGCCGGACCAGTCCCCTA |
| | | AGCCCCTGATCTACGCCACTTCCAACCTGGCCTCCGG |
| | | CGTGCCGTCGAGGTTCAGCGGCTCGGGCAGCGGGAC |
| | | CGACTACACCCTGACCATCAACAGCCTTGAAGCTGAG |
| | | GACGCCGCTACCTACTACTGCCAGCAGTGGATTTTCA |
| | | ACCCTCCCACATTTGGACAGGGCACTAAGCTGGAGAT |
| | | TAAGACCACTACCCCAGCACCGAGGCCACCCACCCC |
| | | GGCTCCTACCATCGCCTCCCAGCCTCTGTCCCTGCGT |
| | | CCGGAGGCATGTAGACCCGCAGCTGGTGGGGCCGTG |
| | | CATACCCGGGGTCTTGACTTCGCCTGCGATATCTACA |
| | | TTTGGGCCCCTCTGGCTGGTACTTGCGGGGTCCTGCT |
| | | GCTTTCACTCGTGATCACTCTTTACTGTAAGCGCGGT |
| | | CGGAAGAAGCTGCTGTACATCTTTAAGCAACCCTTCA |
| | | TGAGGCCTGTGCAGACTACTCAAGAGGAGGACGGCT |
| | | GTTCATGCCGGTTCCCAGAGGAGGAGGAAGGCGGCT |
| | | GCGAACTGCGCGTGAAATTCAGCCGCAGCGCAGATG |
| | | CTCCAGCCTACCAGCAGGGGCAGAACCAGCTCTACA |
| | | ACGAACTCAATCTTGGTCGGAGAGAGGAGTACGACG |
| | | TGCTGGACAAGCGGAGAGGACGGGACCCAGAAATGG |
| | | GCGGGAAGCCGCGCAGAAAGAATCCCCAAGAGGGCC |
| | | TGTACAACGAGCTCCAAAAGGATAAGATGGCAGAAG |
| | | CCTATAGCGAGATTGGTATGAAAGGGGAACGCAGAA |
| | | GAGGCAAAGGCCACGACGGACTGTACCAGGGACTCA |
| | | GCACCGCCACCAAGGACACCTATGACGCTCTTCACAT |
| | | GCAGGCCCTGCCGCCTCGG |
| CD20-C8H2 | | |
| SEQ ID NO: | HCDR1 | RYNMH |
| 2145 (Kabat) | | |
| SEQ ID NO: | HCDR2 | AIYPGNGDTSYSQKFKG |
| 2146 (Kabat) | | |
| SEQ ID NO: | HCDR3 | SFFYGSSDWYFDV |
| 2147 (Kabat) | | |
| SEQ ID NO: | HCDR1 | GYTFTRY |
| 2148 (Chothia) | | |
| SEQ ID NO: | HCDR2 | YPGNGD |
| 2047 (Chothia) | | |
| SEQ ID NO: | HCDR3 | SFFYGSSDWYFDV |
| 2147 (Chothia) | | |
| SEQ ID NO: | HCDR1 | GYTFTRYN |
| 2149 (IMGT) | | |
| SEQ ID NO: | HCDR2 | IYPGNGDT |
| 2049 (IMGT) | | |
| SEQ ID NO: | HCDR3 | ARSFFYGSSDWYFDV |
| 2150 (IMGT) | | |
| SEQ ID NO: | HCDR1 | GYTFTRYNMH |
| 2151 (Combined | | |
| Chothia and | | |
| Kabat) | | |
| SEQ ID NO: | HCDR2 | AIYPGNGDTSYSQKFKG |
| 2146 (Combined | | |
| Chothia and | | |
| Kabat) | | |
| SEQ ID NO: | HCDR3 | SFFYGSSDWYFDV |
| 2147 (Combined | | |
| Chothia and | | |
| Kabat) | | |
| SEQ ID NO: | VH | QVQLVQSGAEVKKPGASVKVSCKASGYTFTRYNMHW |
| 2152 | | VRQAPGQRLEWMGAIYPGNGDTSYSQKFKGRVTITAD |
| | | KSASTAYMELSSLRSEDTAVYYCARSFFYGSSDWYFDV |
| | | WGQGTTVTVSS |
| SEQ ID NO: | DNA VH | CAAGTGCAACTCGTCCAATCCGGCGCGGAAGTCAAA |
| 2163 | | AAGCCTGGAGCCTCCGTCAAAGTGTCCTGCAAGGCCT |
| | | CCGGTTACACTTTCACTCGCTACAACATGCATTGGGT |
| | | GCGGCAGGCCCCGGGACAGCGCCTGGAATGGATGGG |
| | | CGCAATCTACCCCGGCAACGGAGACACCTCCTATTCC |
| | | CAAAAGTTCAAGGGAAGGGTCACAATCACGGCCGAC |
| | | AAGAGCGCCTCAACTGCCTACATGGAGCTGAGCAGC |
| | | CTCAGATCCGAAGATACCGCGGTGTACTACTGCGCCC |
| | | GGAGCTTCTTCTACGGTTCGTCTGATTGGTACTTTGAC |
| | | GTCTGGGGCCAGGGAACCACCGTGACCGTGTCGTCC |
| SEQ ID NO: | LCDR1 | RASSSVNNMH |
| 2154 (Kabat) | | |
| SEQ ID NO: | LCDR2 | ATSNLAS |
| 2031 (Kabat) | | |
| SEQ ID NO: | LCDR3 | QQWIFNPPT |
| 2055 (Kabat) | | |
| SEQ ID NO: | LCDR1 | SSSVNN |
| 2155 (Chothia) | | |
| SEQ ID NO: | LCDR2 | ATS |
| 2034 (Chothia) | | |
| SEQ ID NO: | LCDR3 | WIFNPP |
| 2057 (Chothia) | | |
| SEQ ID NO: | LCDR1 | SSVNN |
| 2156 (IMGT) | | |
| SEQ ID NO: | LCDR2 | ATS |
| 2034 (IMGT) | | |
| SEQ ID NO: | LCDR3 | QQWIFNPPT |
| 2055 (IMGT) | | |
| SEQ ID NO: | LCDR1 | RASSSVNNMH |
| 2154 (Combined | | |
| Chothia and | | |
| Kabat) | | |
| SEQ ID NO: | LCDR2 | ATSNLAS |
| 2031 (Combined | | |
| Chothia and | | |
| Kabat) | | |
| SEQ ID NO: | LCDR3 | QQWIFNPPT |
| 2055 (Combined | | |
| Chothia and | | |
| Kabat) | | |
| SEQ ID NO: | VL | DIQLTQSPSFLSASVGDRVTITCRASSSVNNMHWYQQK |
| 2164 | | PGKAPKPLIYATSNLASGVPSRFSGSGSGTEYTLTISSLQ |
| | | PEDFATYYCQQWIFNPPTFGQGTKLEIK |
| SEQ ID NO: | DNA VL | GACATCCAGCTTACCCAGTCGCCATCATTCCTGTCCG |
| 2165 | | CATCAGTGGGTGATCGCGTGACCATTACCTGTCGGGC |
| | | GTCCTCCTCCGTGAACAACATGCACTGGTACCAGCAG |
| | | AAGCCGGGGAAGGCTCCCAAGCCTCTGATCTACGCC |
| | | ACTAGCAATTTGGCCAGCGGCGTGCCTTCGAGATTCT |
| | | CGGGGTCGGGCTCAGGAACCGAGTATACCCTGACCA |
| | | TTTCCTCCCTCCAACCGGAGGACTTTGCTACTTACTAC |
| | | TGCCAGCAGTGGATTTTCAACCCCCCGACTTTCGGAC |
| | | AGGGCACCAAGCTGGAAATCAAG |
| SEQ ID NO: | Linker | GGGGSGGGGSGGGGSGGGGS |
| 1010 | | |
| SEQ ID NO: | scFv (VH- | QVQLVQSGAEVKKPGASVKVSCKASGYTFTRYNMHW |
| 2166 | linker-VL) | VRQAPGQRLEWMGAIYPGNGDTSYSQKFKGRVTITAD |
| | | KSASTAYMELSSLRSEDTAVYYCARSFFYGSSDWYFDV |
| | | WGQGTTVTVSSGGGGSGGGGSGGGGSGGGGSDIQLTQ |
| | | SPSFLSASVGDRVTITCRASSSVNNMHWYQQKPGKAPK |
| | | PLIYATSNLASGVPSRFSGSGSGTEYTLTISSLQPEDFAT |
| | | YYCQQWIFNPPTFGQGTKLEIK |
| SEQ ID NO: | DNA scFv | CAAGTGCAACTCGTCCAATCCGGCGCGGAAGTCAAA |
| 2167 | (VH-linker- | AAGCCTGGAGCCTCCGTCAAAGTGTCCTGCAAGGCCT |
| | VL) | CCGGTTACACTTTCACTCGCTACAACATGCATTGGGT |
| | | GCGGCAGGCCCCGGGACAGCGCCTGGAATGGATGGG |
| | | CGCAATCTACCCCGGCAACGGAGACACCTCCTATTCC |
| | | CAAAAGTTCAAGGGAAGGGTCACAATCACGGCCGAC |
| | | AAGAGCGCCTCAACTGCCTACATGGAGCTGAGCAGC |
| | | CTCAGATCCGAAGATACCGCGGTGTACTACTGCGCCC |
| | | GGAGCTTCTTCTACGGTTCGTCTGATTGGTACTTTGAC |
| | | GTCTGGGGCCAGGGAACCACCGTGACCGTGTCGTCC |
| | | GGTGGCGGAGGGAGCGGTGGAGGAGGCTCCGGGGG |
| | | AGGAGGCAGCGGCGGGGGAGGCAGCGACATCCAGCT |
| | | TACCCAGTCGCCATCATTCCTGTCCGCATCAGTGGGT |
| | | GATCGCGTGACCATTACCTGTCGGGCGTCCTCCTCCG |
| | | TGAACAACATGCACTGGTACCAGCAGAAGCCGGGGA |
| | | AGGCTCCCAAGCCTCTGATCTACGCCACTAGCAATTT |
| | | GGCCAGCGGCGTGCCTTCGAGATTCTCGGGGTCGGGC |
| | | TCAGGAACCGAGTATACCCTGACCATTICCTCCCTCC |
| | | AACCGGAGGACTTTGCTACTTACTACTGCCAGCAGTG |
| | | GATTTTCAACCCCCCGACTTTCGGACAGGGCACCAAG |
| | | CTGGAAATCAAG |
| SEQ ID NO: | Full CAR | MALPVTALLLPLALLLHAARPQVQLVQSGAEVKKPGAS |
| 2168 | amino acid | VKVSCKASGYTFTRYNMHWVRQAPGQRLEWMGAIYP |
| | sequence | GNGDTSYSQKFKGRVTITADKSASTAYMELSSLRSEDT |
| | | AVYYCARSFFYGSSDWYFDVWGQGTTVTVSSGGGGSG |
| | | GGGSGGGGSGGGGSDIQLTQSPSFLSASVGDRVTITCRA |
| | | SSSVNNMHWYQQKPGKAPKPLIYATSNLASGVPSRFSG |
| | | SGSGTEYTLTISSLQPEDFATYYCQQWIFNPPTFGQGTK |
| | | LEIKTTTPAPRPPTPAPTIASQPLSLRPEACRPAAGGAVH |
| | | TRGLDFACDIYIWAPLAGTCGVLLLSLVITLYCKRGRKK |
| | | LLYIFKQPFMRPVQTTQEEDGCSCRFPEEEEGGCELRVK |
| | | FSRSADAPAYQQGQNQLYNELNLGRREEYDVLDKRRG |
| | | RDPEMGGKPRRKNPQEGLYNELQKDKMAEAYSEIGMK |
| | | GERRRGKGHDGLYQGLSTATKDTYDALHMQALPPR |
| SEQ ID NO: | Full CAR | ATGGCCCTCCCTGTCACCGCCCTGCTGCTTCCGCTGG |
| 2169 | nucleic acid | CTCTTCTGCTCCACGCCGCTCGGCCCCAAGTGCAACT |
| | sequence | CGTCCAATCCGGCGCGGAAGTCAAAAAGCCTGGAGC |
| | | CTCCGTCAAAGTGTCCTGCAAGGCCTCCGGTTACACT |
| | | TTCACTCGCTACAACATGCATTGGGTGCGGCAGGCCC |
| | | CGGGACAGCGCCTGGAATGGATGGGCGCAATCTACC |
| | | CCGGCAACGGAGACACCTCCTATTCCCAAAAGTTCAA |
| | | GGGAAGGGTCACAATCACGGCCGACAAGAGCGCCTC |
| | | AACTGCCTACATGGAGCTGAGCAGCCTCAGATCCGA |
| | | AGATACCGCGGTGTACTACTGCGCCCGGAGCTTCTTC |
| | | TACGGTTCGTCTGATTGGTACTTTGACGTCTGGGGCC |
| | | AGGGAACCACCGTGACCGTGTCGTCCGGTGGCGGAG |
| | | GGAGCGGTGGAGGAGGCTCCGGGGGAGGAGGCAGC |
| | | GGCGGGGGAGGCAGCGACATCCAGCTTACCCAGTCG |
| | | CCATCATTCCTGTCCGCATCAGTGGGTGATCGCGTGA |
| | | CCATTACCTGTCGGGCGTCCTCCTCCGTGAACAACAT |
| | | GCACTGGTACCAGCAGAAGCCGGGGAAGGCTCCCAA |
| | | GCCTCTGATCTACGCCACTAGCAATTTGGCCAGCGGC |
| | | GTGCCTTCGAGATTCTCGGGGTCGGGCTCAGGAACCG |
| | | AGTATACCCTGACCATTTCCTCCCTCCAACCGGAGGA |
| | | CTTTGCTACTTACTACTGCCAGCAGTGGATTTTCAAC |
| | | CCCCCGACTTTCGGACAGGGCACCAAGCTGGAAATC |
| | | AAGACCACTACCCCAGCACCGAGGCCACCCACCCCG |
| | | GCTCCTACCATCGCCTCCCAGCCTCTGTCCCTGCGTCC |
| | | GGAGGCATGTAGACCCGCAGCTGGTGGGGCCGTGCA |
| | | TACCCGGGGTCTTGACTTCGCCTGCGATATCTACATT |
| | | TGGGCCCCTCTGGCTGGTACTTGCGGGGTCCTGCTGC |
| | | TTTCACTCGTGATCACTCTTTACTGTAAGCGCGGTCG |
| | | GAAGAAGCTGCTGTACATCTTTAAGCAACCCTTCATG |
| | | AGGCCTGTGCAGACTACTCAAGAGGAGGACGGCTGT |
| | | TCATGCCGGTTCCCAGAGGAGGAGGAAGGCGGCTGC |
| | | GAACTGCGCGTGAAATTCAGCCGCAGCGCAGATGCT |
| | | CCAGCCTACCAGCAGGGGCAGAACCAGCTCTACAAC |
| | | GAACTCAATCTTGGTCGGAGAGAGGAGTACGACGTG |
| | | CTGGACAAGCGGAGAGGACGGGACCCAGAAATGGGC |
| | | GGGAAGCCGCGCAGAAAGAATCCCCAAGAGGGCCTG |
| | | TACAACGAGCTCCAAAAGGATAAGATGGCAGAAGCC |
| | | TATAGCGAGATTGGTATGAAAGGGGAACGCAGAAGA |
| | | GGCAAAGGCCACGACGGACTGTACCAGGGACTCAGC |
| | | ACCGCCACCAAGGACACCTATGACGCTCTTCACATGC |
| | | AGGCCCTGCCGCCTCGG |
| CD20-C8H3 | | |
| SEQ ID NO: | HCDR1 | RYNMH |
| 2145 (Kabat) | | |
| SEQ ID NO: | HCDR2 | AIYPGNGDTSYSQKFKG |
| 2146 (Kabat) | | |
| SEQ ID NO: | HCDR3 | SFFYGSSDWYFDV |
| 2147 (Kabat) | | |
| SEQ ID NO: | HCDR1 | GYTFTRY |
| 2148 (Chothia) | | |
| SEQ ID NO: | HCDR2 | YPGNGD |
| 2047 (Chothia) | | |
| SEQ ID NO: | HCDR3 | SFFYGSSDWYFDV |
| 2147 (Chothia) | | |
| SEQ ID NO: | HCDR1 | GYTFTRYN |
| 2149 (IMGT) | | |
| SEQ ID NO: | HCDR2 | IYPGNGDT |
| 2049 (IMGT) | | |
| SEQ ID NO: | HCDR3 | ARSFFYGSSDWYFDV |
| 2150 (IMGT) | | |
| SEQ ID NO: | HCDR | GYTFTRYNMH |
| 2151 (Combined | | |
| Chothia and | | |
| Kabat | | |
| SEQ ID NO: | HCDR2 | AIYPGNGDTSYSQKFKG |
| 2146 (Combined | | |
| Chothia and | | |
| Kabat | | |
| SEQ ID NO: | HCDR3 | SFFYGSSDWYFDV |
| 2147 (Combined | | |
| Chothia and | | |
| Kabat | | |
| SEQ ID NO: | VH | QVQLVQSGAEVKKPGSSVKVSCKASGYTFTRYNMHW |
| 2170 | | VRQAPGQGLEWMGAIYPGNGDTSYSQKFKGRVTITAD |
| | | KSTSTAYMELSSLRSEDTAVYYCARSFFYGSSDWYFDV |
| | | WGQGTTVTVSS |
| SEQ ID NO: | DNA VH | CAAGTGCAACTCGTCCAGTCCGGTGCAGAAGTCAAG |
| 2171 | | AAGCCTGGTTCCTCCGTGAAAGTGTCCTGCAAAGCGT |
| | | CTGGCTACACCTTCACCCGGTACAATATGCACTGGGT |
| | | CAGACAGGCGCCCGGACAGGGCCTGGAGTGGATGGG |
| | | GGCCATCTACCCTGGGAACGGCGACACTAGCTACTCC |
| | | CAAAAGTTCAAGGGCCGCGTGACGATTACCGCCGAC |
| | | AAGTCAACCAGCACTGCCTATATGGAGCTGAGCTCGC |
| | | TTCGGAGCGAAGATACCGCCGTGTACTACTGCGCTCG |
| | | GAGCTTCTTCTACGGGTCCTCGGATTGGTACTTCGAC |
| | | GTCTGGGGCCAGGGGACTACTGTGACCGTGTCCTCC |
| SEQ ID NO: | LCDR1 | RASSSVNNMH |
| 2154 (Kabat) | | |
| SEQ ID NO: | LCDR2 | ATSNLAS |
| 2031 (Kabat) | | |
| SEQ ID NO: | LCDR3 | QQWIFNPPT |
| 2055 (Kabat) | | |
| SEQ ID NO: | LCDR1 | SSSVNN |
| 2155 (Chothia) | | |
| SEQ ID NO: | LCDR2 | ATS |
| 2034 (Chothia) | | |
| SEQ ID NO: | LCDR3 | WIFNPP |
| 2057 (Chothia) | | |
| SEQ ID NO: | LCDR1 | SSVNN |
| 2156 (IMGT) | | |
| SEQ ID NO: | LCDR2 | ATS |
| 2034 (IMGT) | | |
| SEQ ID NO: | LCDR3 | QQWIFNPPT |
| 2055 (IMGT) | | |
| SEQ ID NO: | LCDR1 | RASSSVNNMH |
| 2154 (Combined | | |
| Chothia and | | |
| Kabat) | | |
| SEQ ID NO: | LCDR2 | ATSNLAS |
| 2031 (Combined | | |
| Chothia and | | |
| Kabat) | | |
| SEQ ID NO: | LCDR3 | QQWIFNPPT |
| 2055 (Combined | | |
| Chothia and | | |
| Kabat) | | |
| SEQ ID NO: | VL | EIVLTQSPDFQSVTPKEKVTITCRASSSVNNMHWYQQK |
| 2157 | | PDQSPKPLIYATSNLASGVPSRFSGSGSGTDYTLTINSLE |
| | | AEDAATYYCQQWIFNPPTFGQGTKLEIK |
| SEQ ID NO: | DNA VL | GAAATCGTGCTGACCCAGTCCCCGGACTTTCAGTCAG |
| 2172 | | TGACTCCCAAGGAGAAGGTCACCATTACTTGTCGCGC |
| | | CTCCTCCTCGGTGAACAACATGCACTGGTACCAGCAG |
| | | AAGCCGGACCAGTCCCCGAAGCCCCTGATCTATGCTA |
| | | CCTCCAACTTGGCGTCCGGCGTGCCGTCAAGGTTCAG |
| | | CGGATCGGGTTCCGGGACAGACTACACCCTGACTATT |
| | | AACTCACTCGAGGCCGAGGATGCCGCCACCTACTACT |
| | | GCCAGCAGTGGATCTTCAACCCTCCAACCTTCGGACA |
| | | AGGAACCAAGCTGGAAATCAAG |
| SEQ ID NO: | Linker | GGGGSGGGGSGGGGSGGGGS |
| 1010 | | |
| SEQ ID NO: | scFv (VH- | QVQLVQSGAEVKKPGSSVKVSCKASGYTFTRYNMHW |
| 2173 | linker-VL) | VRQAPGQGLEWMGAIYPGNGDTSYSQKFKGRVTITAD |
| | | KSTSTAYMELSSLRSEDTAVYYCARSFFYGSSDWYFDV |
| | | WGQGTTVTVSSGGGGSGGGGSGGGGSGGGGSEIVLTQ |
| | | SPDFQSVTPKEKVTITCRASSSVNNMHWYQQKPDQSPK |
| | | PLIYATSNLASGVPSRFSGSGSGTDYTLTINSLEAEDAAT |
| | | YYCQQWIFNPPTFGQGTKLEIK |
| SEQ ID NO: | DNA scFv | CAAGTGCAACTCGTCCAGTCCGGTGCAGAAGTCAAG |
| 2174 | (VH-linker- | AAGCCTGGTTCCTCCGTGAAAGTGTCCTGCAAAGCGT |
| | VL) | CTGGCTACACCTTCACCCGGTACAATATGCACTGGGT |
| | | CAGACAGGCGCCCGGACAGGGCCTGGAGTGGATGGG |
| | | GGCCATCTACCCTGGGAACGGCGACACTAGCTACTCC |
| | | CAAAAGTTCAAGGGCCGCGTGACGATTACCGCCGAC |
| | | AAGTCAACCAGCACTGCCTATATGGAGCTGAGCTCGC |
| | | TTCGGAGCGAAGATACCGCCGTGTACTACTGCGCTCG |
| | | GAGCTTCTTCTACGGGTCCTCGGATTGGTACTTCGAC |
| | | GTCTGGGGCCAGGGGACTACTGTGACCGTGTCCTCCG |
| | | GGGGAGGAGGATCGGGCGGAGGCGGTTCGGGAGGC |
| | | GGCGGAAGCGGAGGCGGAGGTTCAGAAATCGTGCTG |
| | | ACCCAGTCCCCGGACTTTCAGTCAGTGACTCCCAAGG |
| | | AGAAGGTCACCATTACTTGTCGCGCCTCCTCCTCGGT |
| | | GAACAACATGCACTGGTACCAGCAGAAGCCGGACCA |
| | | GTCCCCGAAGCCCCTGATCTATGCTACCTCCAACTTG |
| | | GCGTCCGGCGTGCCGTCAAGGTTCAGCGGATCGGGTT |
| | | CCGGGACAGACTACACCCTGACTATTAACTCACTCGA |
| | | GGCCGAGGATGCCGCCACCTACTACTGCCAGCAGTG |
| | | GATCTTCAACCCTCCAACCTTCGGACAAGGAACCAAG |
| | | CTGGAAATCAAG |
| SEQ ID NO: | Full CAR | MALPVTALLLPLALLLHAARPQVQLVQSGAEVKKPGSS |
| 2175 | amino acid | VKVSCKASGYTFTRYNMHWVRQAPGQGLEWMGAIYP |
| | sequence | GNGDTSYSQKFKGRVTITADKSTSTAYMELSSLRSEDT |
| | | AVYYCARSFFYGSSDWYFDVWGQGTTVTVSSGGGGSG |
| | | GGGSGGGGSGGGGSEIVLTQSPDFQSVTPKEKVTITCRA |
| | | SSSVNNMHWYQQKPDQSPKPLIYATSNLASGVPSRFSG |
| | | SGSGTDYTLTINSLEAEDAATYYCQQWIFNPPTFGQGTK |
| | | LEIKTTTPAPRPPTPAPTIASQPLSLRPEACRPAAGGAVH |
| | | TRGLDFACDIYIWAPLAGTCGVLLLSLVITLYCKRGRKK |
| | | LLYIFKQPFMRPVQTTQEEDGCSCRFPEEEEGGCELRVK |
| | | FSRSADAPAYQQGQNQLYNELNLGRREEYDVLDKRRG |
| | | RDPEMGGKPRRKNPQEGLYNELQKDKMAEAYSEIGMK |
| | | GERRRGKGHDGLYQGLSTATKDTYDALHMQALPPR |
| SEQ ID NO: | Full CAR | ATGGCCCTCCCTGTCACCGCCCTGCTGCTTCCGCTGG |
| 2176 | nucleic acid | CTCTTCTGCTCCACGCCGCTCGGCCCCAAGTGCAACT |
| | sequence | CGTCCAGTCCGGTGCAGAAGTCAAGAAGCCTGGTTCC |
| | | TCCGTGAAAGTGTCCTGCAAAGCGTCTGGCTACACCT |
| | | TCACCCGGTACAATATGCACTGGGTCAGACAGGCGC |
| | | CCGGACAGGGCCTGGAGTGGATGGGGGCCATCTACC |
| | | CTGGGAACGGCGACACTAGCTACTCCCAAAAGTTCA |
| | | AGGGCCGCGTGACGATTACCGCCGACAAGTCAACCA |
| | | GCACTGCCTATATGGAGCTGAGCTCGCTTCGGAGCGA |
| | | AGATACCGCCGTGTACTACTGCGCTCGGAGCTTCTTC |
| | | TACGGGTCCTCGGATTGGTACTTCGACGTCTGGGGCC |
| | | AGGGGACTACTGTGACCGTGTCCTCCGGGGGAGGAG |
| | | GATCGGGCGGAGGCGGTTCGGGAGGCGGCGGAAGCG |
| | | GAGGCGGAGGTTCAGAAATCGTGCTGACCCAGTCCC |
| | | CGGACTTTCAGTCAGTGACTCCCAAGGAGAAGGTCA |
| | | CCATTACTTGTCGCGCCTCCTCCTCGGTGAACAACAT |
| | | GCACTGGTACCAGCAGAAGCCGGACCAGTCCCCGAA |
| | | GCCCCTGATCTATGCTACCTCCAACTTGGCGTCCGGC |
| | | GTGCCGTCAAGGTTCAGCGGATCGGGTTCCGGGACA |
| | | GACTACACCCTGACTATTAACTCACTCGAGGCCGAGG |
| | | ATGCCGCCACCTACTACTGCCAGCAGTGGATCTTCAA |
| | | CCCTCCAACCTTCGGACAAGGAACCAAGCTGGAAAT |
| | | CAAGACCACTACCCCAGCACCGAGGCCACCCACCCC |
| | | GGCTCCTACCATCGCCTCCCAGCCTCTGTCCCTGCGT |
| | | CCGGAGGCATGTAGACCCGCAGCTGGTGGGGCCGTG |
| | | CATACCCGGGGTCTTGACTTCGCCTGCGATATCTACA |
| | | TTTGGGCCCCTCTGGCTGGTACTTGCGGGGTCCTGCT |
| | | GCTTTCACTCGTGATCACTCTTTACTGTAAGCGCGGT |
| | | CGGAAGAAGCTGCTGTACATCTTTAAGCAACCCTTCA |
| | | TGAGGCCTGTGCAGACTACTCAAGAGGAGGACGGCT |
| | | GTTCATGCCGGTTCCCAGAGGAGGAGGAAGGCGGCT |
| | | GCGAACTGCGCGTGAAATTCAGCCGCAGCGCAGATG |
| | | CTCCAGCCTACCAGCAGGGGCAGAACCAGCTCTACA |
| | | ACGAACTCAATCTTGGTCGGAGAGAGGAGTACGACG |
| | | TGCTGGACAAGCGGAGAGGACGGGACCCAGAAATGG |
| | | GCGGGAAGCCGCGCAGAAAGAATCCCCAAGAGGGCC |
| | | TGTACAACGAGCTCCAAAAGGATAAGATGGCAGAAG |
| | | CCTATAGCGAGATTGGTATGAAAGGGGAACGCAGAA |
| | | GAGGCAAAGGCCACGACGGACTGTACCAGGGACTCA |
| | | GCACCGCCACCAAGGACACCTATGACGCTCTTCACAT |
| | | GCAGGCCCTGCCGCCTCGG |
| CD20-C8H4 | | |
| SEQ ID NO: | HCDR1 | RYNMH |
| 2145 (Kabat) | | |
| SEQ ID NO: | HCDR2 | AIYPGNGDTSYSQKFKG |
| 2146 (Kabat) | | |
| SEQ ID NO: | HCDR3 | SFFYGSSDWYFDV |
| 2147 (Kabat) | | |
| SEQ ID NO: | HCDR1 | GYTFTRY |
| 2148 (Chothia) | | |
| SEQ ID NO: | HCDR2 | YPGNGD |
| 2047 (Chothia) | | |
| SEQ ID NO: | HCDR3 | SFFYGSSDWYFDV |
| 2147 (Chothia) | | |
| SEQ ID NO: | HCDR1 | GYTFTRYN |
| 2149 (IMGT) | | |
| SEQ ID NO: | HCDR2 | IYPGNGDT |
| 2049 (IMGT) | | |
| SEQ ID NO: | HCDR3 | ARSFFYGSSDWYFDV |
| 2150 (IMGT) | | |
| SEQ ID NO: | HCDR1 | GYTFTRYNMH |
| 2151 (Combined | | |
| Chothia and | | |
| Kabat) | | |
| SEQ ID NO: | HCDR2 | AIYPGNGDTSYSQKFKG |
| 2146 (Combined | | |
| Chothia and | | |
| Kabat) | | |
| SEQ ID NO: | HCDR3 | SFFYGSSDWYFDV |
| 2147 (Combined | | |
| Chothia and | | |
| Kabat) | | |
| SEQ ID NO: | VH | QVQLVQSGAEVKKPGSSVKVSCKASGYTFTRYNMHW |
| 2170 | | VRQAPGQGLEWMGAIYPGNGDTSYSQKFKGRVTITAD |
| | | KSTSTAYMELSSLRSEDTAVYYCARSFFYGSSDWYFDV |
| | | WGQGTTVTVSS |
| SEQ ID NO: | DNA VH | CAAGTCCAACTCGTCCAGTCTGGCGCAGAAGTCAAG |
| 2177 | | AAGCCCGGAAGCTCCGTGAAAGTGTCCTGCAAAGCG |
| | | TCGGGTTACACTTTCACCCGGTACAACATGCACTGGG |
| | | TCAGACAGGCCCCTGGACAAGGACTGGAGTGGATGG |
| | | GTGCCATCTACCCTGGAAACGGAGATACCTCCTACTC |
| | | CCAAAAGTTCAAGGGGAGAGTGACCATTACCGCCGA |
| | | CAAGTCAACTTCCACCGCTTACATGGAGCTCAGCTCC |
| | | CTGCGGTCCGAAGATACTGCGGTGTACTATTGCGCTC |
| | | GCTCATTTTTCTACGGCTCATCGGATTGGTACTTCGAC |
| | | GTCTGGGGACAGGGAACTACCGTGACCGTGTCCTCG |
| SEQ ID NO: | LCDR1 | RASSSVNNMH |
| 2154 (Kabat) | | |
| SEQ ID NO: | LCDR2 | ATSNLAS |
| 2031 (Kabat) | | |
| SEQ ID NO: | LCDR3 | QQWIFNPPT |
| 2055 (Kabat) | | |
| SEQ ID NO: | LCDR1 | SSSVNN |
| 2155 (Chothia) | | |
| SEQ ID NO: | LCDR2 | ATS |
| 2034 (Chothia) | | |
| SEQ ID NO: | LCDR3 | WIFNPP |
| 2057 (Chothia) | | |
| SEQ ID NO: | LCDR1 | SSVNN |
| 2156 (IMGT) | | |
| SEQ ID NO: | LCDR2 | ATS |
| 2034 (IMGT) | | |
| SEQ ID NO: | LCDR3 | QQWIFNPPT |
| 2055 (IMGT) | | |
| SEQ ID NO: | LCDR1 | RASSSVNNMH |
| 2154 (Combined | | |
| Chothia and | | |
| Kabat) | | |
| SEQ ID NO: | LCDR2 | ATSNLAS |
| 2031 (Combined | | |
| Chothia and | | |
| Kabat) | | |
| SEQ ID NO: | LCDR3 | QQWIFNPPT |
| 2055 (Combined | | |
| Chothia and | | |
| Kabat) | | |
| SEQ ID NO: | VL | DIQLTQSPSFLSASVGDRVTITCRASSSVNNMHWYQQK |
| 2164 | | PGKAPKPLIYATSNLASGVPSRFSGSGSGTEYTLTISSLQ |
| | | PEDFATYYCQQWIFNPPTFGQGTKLEIK |
| SEQ ID NO: | DNA VL | GACATCCAGCTGACTCAGTCCCCGTCCTTCCTGTCCG |
| 2178 | | CCTCCGTGGGGGACCGCGTGACGATTACTTGTCGGGC |
| | | CTCCTCATCCGTGAACAACATGCATTGGTACCAGCAG |
| | | AAGCCAGGAAAGGCACCGAAGCCGCTTATCTATGCC |
| | | ACCTCGAATCTGGCCAGCGGAGTGCCTTCGAGGTTTA |
| | | GCGGCTCCGGCTCCGGCACCGAGTACACTTTGACCAT |
| | | TAGCAGCCTCCAGCCGGAGGACTTCGCCACATACTAC |
| | | TGCCAGCAGTGGATCTTCAACCCCCCCACCTTCGGCC |
| | | AAGGAACCAAGCTGGAAATCAAG |
| SEQ ID NO: | Linker | GGGGSGGGGSGGGGSGGGGS |
| 1010 | | |
| SEQ ID NO: | scFv (VH- | QVQLVQSGAEVKKPGSSVKVSCKASGYTFTRYNMHW |
| 2179 | linker-VL) | VRQAPGQGLEWMGAIYPGNGDTSYSQKFKGRVTITAD |
| | | KSTSTAYMELSSLRSEDTAVYYCARSFFYGSSDWYFDV |
| | | WGQGTTVTVSSGGGGSGGGGSGGGGSGGGGSDIQLTQ |
| | | SPSFLSASVGDRVTITCRASSSVNNMHWYQQKPGKAPK |
| | | PLIYATSNLASGVPSRFSGSGSGTEYTLTISSLQPEDFAT |
| | | YYCQQWIFNPPTFGQGTKLEIK |
| SEQ ID NO: | DNA scFv | CAAGTCCAACTCGTCCAGTCTGGCGCAGAAGTCAAG |
| 2180 | (VH-linker- | AAGCCCGGAAGCTCCGTGAAAGTGTCCTGCAAAGCG |
| | VL) | TCGGGTTACACTTTCACCCGGTACAACATGCACTGGG |
| | | TCAGACAGGCCCCTGGACAAGGACTGGAGTGGATGG |
| | | GTGCCATCTACCCTGGAAACGGAGATACCTCCTACTC |
| | | CCAAAAGTTCAAGGGGAGAGTGACCATTACCGCCGA |
| | | CAAGTCAACTTCCACCGCTTACATGGAGCTCAGCTCC |
| | | CTGCGGTCCGAAGATACTGCGGTGTACTATTGCGCTC |
| | | GCTCATTTTTCTACGGCTCATCGGATTGGTACTTCGAC |
| | | GTCTGGGGACAGGGAACTACCGTGACCGTGTCCTCG |
| | | GGGGGAGGAGGATCGGGCGGAGGCGGTTCGGGAGG |
| | | CGGCGGAAGCGGAGGCGGAGGTTCAGACATCCAGCT |
| | | GACTCAGTCCCCGTCCTTCCTGTCCGCCTCCGTGGGG |
| | | GACCGCGTGACGATTACTTGTCGGGCCTCCTCATCCG |
| | | TGAACAACATGCATTGGTACCAGCAGAAGCCAGGAA |
| | | AGGCACCGAAGCCGCTTATCTATGCCACCTCGAATCT |
| | | GGCCAGCGGAGTGCCTTCGAGGTTTAGCGGCTCCGGC |
| | | TCCGGCACCGAGTACACTTTGACCATTAGCAGCCTCC |
| | | AGCCGGAGGACTTCGCCACATACTACTGCCAGCAGT |
| | | GGATCTTCAACCCCCCCACCTTCGGCCAAGGAACCAA |
| | | GCTGGAAATCAAG |
| SEQ ID NO: | Full CAR | MALPVTALLLPLALLLHAARPQVQLVQSGAEVKKPGSS |
| 2181 | amino acid | VKVSCKASGYTFTRYNMHWVRQAPGQGLEWMGAIYP |
| | sequence | GNGDTSYSQKFKGRVTITADKSTSTAYMELSSLRSEDT |
| | | AVYYCARSFFYGSSDWYFDVWGQGTTVTVSSGGGGSG |
| | | GGGSGGGGSGGGGSDIQLTQSPSFLSASVGDRVTITCRA |
| | | SSSVNNMHWYQQKPGKAPKPLIYATSNLASGVPSRFSG |
| | | SGSGTEYTLTISSLQPEDFATYYCQQWIFNPPTFGQGTK |
| | | LEIKTTTPAPRPPTPAPTIASQPLSLRPEACRPAAGGAVH |
| | | TRGLDFACDIYIWAPLAGTCGVLLLSLVITLYCKRGRKK |
| | | LLYIFKQPFMRPVQTTQEEDGCSCRFPEEEEGGCELRVK |
| | | FSRSADAPAYQQGQNQLYNELNLGRREEYDVLDKRRG |
| | | RDPEMGGKPRRKNPQEGLYNELQKDKMAEAYSEIGMK |
| | | GERRRGKGHDGLYQGLSTATKDTYDALHMQALPPR |
| SEQ ID NO: | Full CAR | ATGGCCCTCCCTGTCACCGCCCTGCTGCTTCCGCTGG |
| 2182 | nucleic acid | CTCTTCTGCTCCACGCCGCTCGGCCCCAAGTCCAACT |
| | sequence | CGTCCAGTCTGGCGCAGAAGTCAAGAAGCCCGGAAG |
| | | CTCCGTGAAAGTGTCCTGCAAAGCGTCGGGTTACACT |
| | | TTCACCCGGTACAACATGCACTGGGTCAGACAGGCCC |
| | | CTGGACAAGGACTGGAGTGGATGGGTGCCATCTACC |
| | | CTGGAAACGGAGATACCTCCTACTCCCAAAAGTTCAA |
| | | GGGGAGAGTGACCATTACCGCCGACAAGTCAACTTC |
| | | CACCGCTTACATGGAGCTCAGCTCCCTGCGGTCCGAA |
| | | GATACTGCGGTGTACTATTGCGCTCGCTCATTTTTCTA |
| | | CGGCTCATCGGATTGGTACTTCGACGTCTGGGGACAG |
| | | GGAACTACCGTGACCGTGTCCTCGGGGGGAGGGGGG |
| | | AGCGGCGGAGGGGGCTCGGGCGGTGGAGGAAGCGG |
| | | AGGCGGCGGTTCGGACATCCAGCTGACTCAGTCCCCG |
| | | TCCTTCCTGTCCGCCTCCGTGGGGGACCGCGTGACGA |
| | | TTACTTGTCGGGCCTCCTCATCCGTGAACAACATGCA |
| | | TTGGTACCAGCAGAAGCCAGGAAAGGCACCGAAGCC |
| | | GCTTATCTATGCCACCTCGAATCTGGCCAGCGGAGTG |
| | | CCTTCGAGGTTTAGCGGCTCCGGCTCCGGCACCGAGT |
| | | ACACTTTGACCATTAGCAGCCTCCAGCCGGAGGACTT |
| | | CGCCACATACTACTGCCAGCAGTGGATCTTCAACCCC |
| | | CCCACCTTCGGCCAAGGAACCAAGCTGGAAATCAAG |
| | | ACCACTACCCCAGCACCGAGGCCACCCACCCCGGCTC |
| | | CTACCATCGCCTCCCAGCCTCTGTCCCTGCGTCCGGA |
| | | GGCATGTAGACCCGCAGCTGGTGGGGCCGTGCATAC |
| | | CCGGGGTCTTGACTTCGCCTGCGATATCTACATTTGG |
| | | GCCCCTCTGGCTGGTACTTGCGGGGTCCTGCTGCTTT |
| | | CACTCGTGATCACTCTTTACTGTAAGCGCGGTCGGAA |
| | | GAAGCTGCTGTACATCTTTAAGCAACCCTTCATGAGG |
| | | CCTGTGCAGACTACTCAAGAGGAGGACGGCTGTTCAT |
| | | GCCGGTTCCCAGAGGAGGAGGAAGGCGGCTGCGAAC |
| | | TGCGCGTGAAATTCAGCCGCAGCGCAGATGCTCCAG |
| | | CCTACCAGCAGGGGCAGAACCAGCTCTACAACGAAC |
| | | TCAATCTTGGTCGGAGAGAGGAGTACGACGTGCTGG |
| | | ACAAGCGGAGAGGACGGGACCCAGAAATGGGCGGG |
| | | AAGCCGCGCAGAAAGAATCCCCAAGAGGGCCTGTAC |
| | | AACGAGCTCCAAAAGGATAAGATGGCAGAAGCCTAT |
| | | AGCGAGATTGGTATGAAAGGGGAACGCAGAAGAGGC |
| | | AAAGGCCACGACGGACTGTACCAGGGACTCAGCACC |
| | | GCCACCAAGGACACCTATGACGCTCTTCACATGCAGG |
| | | CCCTGCCGCCTCGG |
| CD20-C2 | | |
| SEQ ID NO: | VH | QVHLQQSGAELAKPGASVKMSCKASGYTFTNYWMHW |
| 2183 | | VKQRPGQGLEWIGFITPTTGYPEYNQKFKDKATLTADK |
| | | SSSTAYMQLSSLTSEDSAVYYCARRKVGKGVYYALDY |
| | | WGQGTSVTVSS |
| SEQ ID NO: | DNA VH | CAAGTGCATCTGCAGCAGTCGGGGGCCGAACTGGCA |
| 2184 | | AAGCCAGGCGCCAGCGTGAAGATGAGCTGCAAGGCC |
| | | TCCGGGTACACCTTCACCAACTACTGGATGCACTGGG |
| | | TCAAGCAGCGCCCGGGCCAGGGACTCGAGTGGATCG |
| | | GGTTCATCACGCCGACTACCGGCTACCCGGAGTATAA |
| | | CCAGAAGTTCAAGGACAAGGCCACTCTGACTGCCGA |
| | | CAAGTCCTCGTCTACCGCGTACATGCAACTGTCCTCA |
| | | CTGACTTCGGAGGATTCCGCTGTGTACTACTGCGCGC |
| | | GGAGGAAAGTCGGAAAGGGAGTGTACTATGCCCTGG |
| | | ACTACTGGGGCCAGGGTACCAGCGTCACTGTGTCCTC |
| | | C |
| SEQ ID NO: | VL | DILMTQSPASLSASVGETVTITCRASGNIHNYLAWYQQ |
| 2185 | | KQGNSPQLLVYNTKTLADGVPSRFSGSGSGTQYSLKINS |
| | | LQTEDFGTYYCQHFWSSPWTFGGGTKLEIK |
| SEQ ID NO: | DNA VL | GACATTCTGATGACCCAGTCCCCTGCATCACTCTCCG |
| 2186 | | CGTCCGTGGGAGAAACCGTGACCATCACGTGTAGAG |
| | | CCTCCGGCAACATCCACAACTACCTGGCCTGGTACCA |
| | | GCAGAAGCAGGGAAACTCGCCCCAACTGCTTGTGTA |
| | | CAACACCAAGACCTTGGCTGACGGAGTGCCTTCCCGG |
| | | TTCTCGGGTTCGGGATCAGGCACACAGTACTCCCTGA |
| | | AAATCAATAGCCTCCAGACCGAAGATTTTGGAACCTA |
| | | CTACTGCCAACACTTCTGGAGCTCCCCCTGGACTTTC |
| | | GGAGGCGGTACCAAGCTCGAGATTAAG |
| CD20-C3 | | |
| SEQ ID NO: | VH | QVQLQQPGAELVKPGASVKMSCKASGYTFTNYNLHW |
| 2187 | | VKQTPGQGLEWIGAIYPGNYDTSYNQKFKGKATLTAD |
| | | KSSSTAYMLLSSLTSEDSAVYFCARVDFGHSRYWYFDV |
| | | WGAGTTVTVSS |
| SEQ ID NO: | DNA VH | CAAGTGCAGCTGCAGCAGCCTGGTGCCGAGCTCGTG |
| 2188 | | AAGCCGGGAGCGTCCGTGAAGATGAGCTGCAAAGCC |
| | | TCGGGCTACACCTTCACCAATTACAACTTGCATTGGG |
| | | TCAAGCAGACCCCGGGCCAGGGCCTCGAATGGATCG |
| | | GAGCGATCTACCCCGGGAACTACGATACTAGCTACA |
| | | ACCAGAAGTTCAAGGGAAAGGCCACCCTGACCGCCG |
| | | ATAAGTCCTCATCCACCGCCTACATGCTGCTGTCCTC |
| | | GCTGACTTCCGAGGACTCCGCTGTGTACTTCTGCGCC |
| | | CGCGTGGACTTCGGACACAGCAGATATTGGTATTTTG |
| | | ACGTCTGGGGCGCCGGGACTACCGTGACTGTGTCGTC |
| | | C |
| SEQ ID NO: | VL | QIVLSQSPAILSASPGEKVTMTCRATSSVSSMNWYQQKP |
| 2189 | | GSFPRPWIHATSNLASGVPARFSGSGSGTSYSLTISRVEA |
| | | EDAATYYCQQWTFNPPTFGAGAKLELK |
| SEQ ID NO: | DNA VL | CAAATTGTCCTGAGCCAGAGCCCGGCTATCCTGTCCG |
| 2190 | | CCTCACCGGGCGAAAAGGTCACCATGACTTGTCGGG |
| | | CCACTTCCTCCGTGTCATCCATGAACTGGTACCAGCA |
| | | GAAGCCTGGCAGCTTCCCTCGGCCATGGATTCACGCC |
| | | ACGTCAAACCTGGCATCGGGAGTGCCCGCAAGGTTCT |
| | | CCGGGTCCGGCAGCGGAACATCCTACTCCCTCACCAT |
| | | CTCGCGCGTGGAAGCGGAGGACGCTGCCACCTACTA |
| | | CTGCCAACAGTGGACCTTCAACCCCCCCACCTTTGGA |
| | | GCGGGAGCCAAGCTGGAACTTAAG |
| CD20-C5 | | |
| SEQ ID NO: | VH | QVQLQQPGAELVKPGASVKMSCKASGYTFTSYNMHW |
| 2191 | | VKQTPGQGLEWIGAIYPGNGDTSYNPKFKGKATLTADK |
| | | SSRTAYIHLSSLTSEDSVVYYCARSYFYGSSSWYFDVW |
| | | GAGTTVTVSS |
| SEQ ID NO: | DNA VH | CAAGTGCAGCTGCAGCAGCCGGGAGCAGAGCTCGTG |
| 2192 | | AAGCCTGGAGCCTCAGTGAAGATGAGCTGCAAGGCC |
| | | TCCGGTTACACCTTCACCTCCTACAACATGCACTGGG |
| | | TCAAGCAGACCCCCGGACAAGGCCTGGAATGGATCG |
| | | GCGCCATCTACCCGGGAAACGGGGACACCTCCTATA |
| | | ACCCCAAGTTCAAGGGAAAAGCAACCCTGACCGCGG |
| | | ACAAGTCCAGCAGAACTGCCTACATCCATCTTTCCTC |
| | | GCTGACGTCCGAGGATTCCGTGGTGTACTACTGTGCC |
| | | CGCTCCTACTTCTACGGGTCATCCTCGTGGTACTTCG |
| | | ATGTCTGGGGCGCTGGAACCACCGTGACTGTGTCCTC |
| | | C |
| SEQ ID NO: | VL | QIILSQSPAILSASPGEKVTLTCRASSSVSSMHWYQQKPG |
| 2193 | | SSPKPWIFATSNLASGVPARFTGSGSGTSYSLTISRVEAE |
| | | DAATYYCQQWIFNPPTFGGGTSLEIK |
| SEQ ID NO: | DNA VL | CAGATCATTCTGAGCCAGAGCCCGGCCATTCTGTCTG |
| 2194 | | CCTCGCCTGGAGAAAAAGTCACCCTCACTTGCCGGGC |
| | | CAGCTCCTCCGTGTCCTCAATGCACTGGTACCAGCAG |
| | | AAGCCTGGCTCAAGCCCGAAGCCCTGGATCTTCGCCA |
| | | CCTCCAATCTGGCGTCAGGAGTGCCCGCGAGGTTCAC |
| | | TGGATCGGGGTCCGGCACATCGTATTCGCTCACCATT |
| | | TCCCGGGTGGAGGCCGAGGACGCCGCTACTTACTACT |
| | | GCCAACAGTGGATCTTCAACCCACCGACCTTTGGCGG |
| | | AGGGACTTCCTTGGAAATCAAG |
| CD20-C6 | | |
| SEQ ID NO: | VH | QIQLVQSGPELKKPGETVKISCKTSGYTFTSHGINWVKQ |
| 2195 | | APRKGLKWMGWINTYTGEPTYGDDFKGRFAFSLETSA |
| | | RTAYLQINNLKNEDTATYFCARYGNYEEPYAMDYWGQ |
| | | GTSVTVSS |
| SEQ ID NO: | DNA VH | CAAATTCAGCTGGTGCAGTCGGGACCTGAGCTCAAG |
| 2196 | | AAGCCCGGAGAAACCGTGAAGATCTCCTGCAAGACT |
| | | TCCGGGTACACTTTTACTTCCCACGGCATCAACTGGG |
| | | TCAAGCAGGCACCAAGGAAGGGGCTTAAGTGGATGG |
| | | GCTGGATTAACACCTACACCGGCGAACCCACCTATGG |
| | | CGATGACTTCAAAGGACGGTTCGCGTTCTCCCTCGAA |
| | | ACCTCAGCAAGAACCGCGTATTTGCAAATCAACAAC |
| | | CTGAAGAACGAGGACACCGCCACCTACTTCTGCGCCC |
| | | GCTACGGAAATTACGAGGAACCTTACGCTATGGACT |
| | | ACTGGGGCCAGGGCACTTCCGTGACTGTGTCGTCC |
| SEQ ID NO: | VL | QIVLSQSPAILSASPGEKVTMTCRATSSVSSMNWYQQKP |
| 2189 | | GSFPRPWIHATSNLASGVPARFSGSGSGTSYSLTISRVEA |
| | | EDAATYYCQQWTFNPPTFGAGAKLELK |
| SEQ ID NO: | DNA VL | CAGATCGTGCTGAGCCAGAGCCCCGCCATCCTGAGC |
| 2197 | | GCTTCCCCGGGAGAAAAGGTCACCATGACTTGCCGG |
| | | GCCACTAGCAGCGTGTCCTCCATGAACTGGTACCAGC |
| | | AGAAGCCGGGCTCCTTCCCTCGCCCCTGGATTCATGC |
| | | CACCTCAAACCTGGCCAGCGGAGTGCCAGCCAGATT |
| | | CTCGGGATCTGGATCGGGGACGTCCTACTCCCTCACC |
| | | ATCTCGCGGGTGGAGGCCGAAGATGCCGCCACATAC |
| | | TACTGTCAACAGTGGACCTTCAACCCGCCGACCTTTG |
| | | GAGCGGGGGCCAAGCTGGAGCTGAAA |
| CD20-C7 | | |
| SEQ ID NO: | VH | QVQLQQPGAELVKPGASVKMSCKASGYTFTSYNIHWV |
| 2198 | | KQTPGQGLEWIGAIYPGNGDTSYNQKFKGKATLTADKS |
| | | STTAFIHFSSLTSEDSVVYYCARSYFYGSDSWYFDVWG |
| | | AGTTVTVSS |
| SEQ ID NO: | DNA VH | CAAGTGCAGCTTCAGCAGCCTGGGGCCGAACTCGTG |
| 2199 | | AAGCCAGGAGCCTCCGTGAAGATGTCATGCAAAGCC |
| | | TCCGGCTACACTTTTACCTCCTACAACATTCATTGGGT |
| | | CAAGCAGACACCTGGCCAGGGCCTGGAATGGATTGG |
| | | TGCAATCTACCCGGGCAACGGAGACACCTCGTACAA |
| | | CCAGAAGTTTAAGGGGAAGGCCACCCTGACCGCGGA |
| | | CAAGTCAAGCACTACCGCGTTCATTCACTTCTCGTCC |
| | | TTGACCTCCGAGGATAGCGTGGTGTACTACTGCGCCC |
| | | GCTCCTATTTCTACGGCTCCGATTCGTGGTACTTCGAC |
| | | GTCTGGGGAGCCGGAACTACCGTGACCGTGTCCTCC |
| SEQ ID NO: | VL | QIILSQSPAILSASPGEKVTLTCRASSGVPSLHWYQQKPG |
| 2200 | | SSPKPWIFATSNLASGVPARFSGSGSGTSYSLTISRVEAE |
| | | DAATYYCQQWIFNPPTFGGGTSLEIK |
| SEQ ID NO: | DNA VL | CAAATCATCCTGAGCCAGAGCCCGGCCATCCTGTCGG |
| 2201 | | CTTCACCCGGGGAAAAGGTCACGCTGACTTGCCGGG |
| | | CCTCCTCCGGCGTGCCAAGCCTCCACTGGTACCAGCA |
| | | AAAGCCTGGCTCGTCCCCCAAACCCTGGATTTTCGCC |
| | | ACCTCCAACCTGGCTAGCGGAGTGCCGGCCAGATTCT |
| | | CGGGTTCCGGGTCCGGCACCAGCTATTCTCTCACCAT |
| | | CTCCCGGGTCGAGGCGGAGGACGCAGCGACTTACTA |
| | | CTGTCAACAGTGGATCTTCAATCCGCCCACCTTCGGC |
| | | GGAGGAACTTCCCTGGAAATCAAG |
| CD20-C8 | | |
| SEQ ID NO: | VH | QVQLLQPGAELVKPGASVKMSCKASGYTFTRYNMHW |
| 2202 | | VKQTPGQGLEWIGAIYPGNGDTSYSQKFKGKATLTADK |
| | | SSSTAYMQLSSLTSEDSAVYYCARSFFYGSSDWYFDVW |
| | | GAGTTVSVSS |
| SEQ ID NO: | DNA VH | CAAGTGCAGCTGCTGCAGCCCGGAGCCGAACTCGTG |
| 2203 | | AAGCCGGGCGCATCCGTGAAAATGAGCTGCAAGGCG |
| | | TCCGGTTACACCTTCACTCGCTACAACATGCACTGGG |
| | | TCAAGCAGACCCCTGGACAAGGCCTGGAGTGGATTG |
| | | GTGCTATCTACCCGGGAAACGGAGACACTAGCTACTC |
| | | GCAGAAATTCAAGGGAAAGGCCACGCTGACCGCCGA |
| | | TAAGTCCTCCTCCACTGCCTACATGCAACTCAGCTCA |
| | | CTGACCTCAGAGGACTCGGCCGTGTACTACTGCGCGA |
| | | GGTCCTTCTTCTACGGGTCCTCGGATTGGTACTTCGA |
| | | CGTCTGGGGCGCCGGTACCACCGTGTCCGTGTCATCC |
| SEQ ID NO: | VL | QIVLSQSPAILSTSPGEKVTLTCRASSSVNNMHWYQQKP |
| 2204 | | GSSPKPWIYATSNLASGVPSRFSGSGSGTSYSLTISRVEA |
| | | EDAATYYCQQWIFNPPTFGAGTKLELK |
| SEQ ID NO: | DNA VL | CAGATCGTGCTGAGCCAGTCCCCGGCGATTCTGTCCA |
| 2205 | | CCTCGCCTGGGGAAAAGGTCACCCTGACATGTAGAG |
| | | CCTCCTCCTCCGTGAACAATATGCATTGGTATCAGCA |
| | | GAAGCCAGGATCAAGCCCCAAGCCCTGGATCTATGC |
| | | CACTTCGAACCTTGCCTCTGGAGTGCCCTCACGGTTC |
| | | TCCGGCTCGGGATCGGGGACCAGCTACAGCTTGACTA |
| | | TCTCCCGGGTGGAGGCTGAGGACGCCGCAACCTACT |
| | | ACTGCCAGCAATGGATCTTCAACCCTCCGACTTTTGG |
| | | GGCCGGAACCAAGCTGGAACTCAAG |
| CD20-3m | | |
| SEQ ID NO: | VH | QVQLVESGGGVVQPGRSLRLSCAASGFTFRDYYMAWV |
| 2206 | | RQAPGKGLEWVASISYEGNPYYGDSVKGRFTISRDNAK |
| | | STLYLQMSSLRAEDTAVYYCARHDHNNVDWFAYWGQ |
| | | GTLVTV |
| SEQ ID NO: | DNA VH | CAAGTGCAGTTGGTGGAATCAGGAGGAGGTGTCGTG |
| 2207 | | CAACCAGGAAGATCATTGAGGCTCTCATGCGCCGCC |
| | | AGCGGATTCACCTTTCGGGATTACTACATGGCCTGGG |
| | | TCCGCCAGGCCCCGGGGAAGGGACTGGAATGGGTGG |
| | | CATCCATCTCGTACGAAGGGAACCCCTACTATGGGGA |
| | | CTCCGTGAAGGGACGGTTCACCATCTCCCGGGACAAC |
| | | GCCAAGTCCACCCTGTACCTTCAAATGTCCTCGCTGA |
| | | GGGCGGAGGATACTGCTGTCTACTACTGTGCCCGCCA |
| | | CGACCATAACAACGTGGACTGGTTCGCCTACTGGGGC |
| | | CAGGGAACCCTCGTCACCGTGTCCTCG |
| SEQ ID NO: | VL | DIVMTQTPLSLSVTPGQPVSMSCKSSQSLLYSENKKNYL |
| 2208 | | AWYLQKPGQSPQLLIFWASTRESGVPDRFSGSGSGTDFT |
| | | LKISRVEAEDVGVYYCQQYYNFPTFGQGTKLEIK |
| SEQ ID NO: | DNA VL | GACATTGTGATGACGCAGACTCCCCTGTCGCTCTCCG |
| 2209 | | TGACCCCTGGCCAGCCCGTGTCGATGTCGTGCAAGAG |
| | | CTCCCAGTCCCTGCTGTATTCCGAGAACAAGAAGAAT |
| | | TACCTTGCGTGGTACCTCCAGAAGCCGGGGCAGAGC |
| | | CCGCAGCTGCTGATTTTCTGGGCGTCCACTAGAGAGT |
| | | CTGGAGTGCCTGACCGGTTTAGCGGAAGCGGCTCCG |
| | | GTACTGATTTCACCCTGAAAATCTCGCGCGTGGAAGC |
| | | TGAGGACGTGGGCGTGTACTACTGCCAGCAGTACTAC |
| | | AACTTCCCTACTTTCGGACAAGGAACCAAGCTGGAA |
| | | ATCAAG |
| SEQ ID NO: | Linker | GGGGSGGGGSGGGGSGGGGS |
| 1010 | | |
| SEQ ID NO: | scFv (VH- | QVQLVESGGGVVQPGRSLRLSCAASGFTFRDYYMAWV |
| 2210 | linker-VL) | RQAPGKGLEWVASISYEGNPYYGDSVKGRFTISRDNAK |
| | | STLYLQMSSLRAEDTAVYYCARHDHNNVDWFAYWGQ |
| | | GTLVTVSSGGGGSGGGGSGGGGSGGGGSDIVMTQTPLS |
| | | LSVTPGQPVSMSCKSSQSLLYSENKKNYLAWYLQKPGQ |
| | | SPQLLIFWASTRESGVPDRFSGSGSGTDFTLKISRVEAED |
| | | VGVYYCQQYYNFPTFGQGTKLEIK |
| CD20-3J | | |
| SEQ ID NO: | VH | QVQLVQSGAEVKKPGASVKVSCKASGFTFRDYYMAW |
| 2211 | | VRQAPGQRLEWMGSISYEGNPYYGDSVKGRVTITRDNS |
| | | ASTLYMELSSLRSEDTAVYYCARHDHNNVDWFAYWG |
| | | QGTLVTVSS |
| SEQ ID NO: | DNA VH | CAAGTCCAACTCGTCCAGTCCGGTGCAGAAGTCAAG |
| 2212 | | AAACCAGGAGCTTCCGTGAAAGTGTCGTGCAAAGCT |
| | | TCAGGCTTCACCTTCCGCGACTATTACATGGCCTGGG |
| | | TCCGCCAAGCGCCCGGACAGCGGCTGGAGTGGATGG |
| | | GGTCCATTTCCTACGAGGGGAACCCCTACTATGGAGA |
| | | TTCCGTGAAGGGCAGAGTGACGATCACTCGGGATAA |
| | | CTCCGCCTCCACTCTCTACATGGAACTGTCCTCGCTTC |
| | | GGAGCGAAGATACCGCGGTGTACTACTGCGCCCGCC |
| | | ACGACCATAACAACGTGGACTGGTTCGCCTACTGGG |
| | | GACAGGGGACCCTCGTGACCGTGTCCTCT |
| SEQ ID NO: | VL | DIQMTQSPSSLSASVGDRVTITCKSSQSLLYSENKKNYL |
| 2213 | | AWYQQKPGKVPKLLIFWASTRESGVPSRFSGSGSGTDF |
| | | TLTISSLQPEDVATYYCQQYYNFPTFGQGTKLEIK |
| SEQ ID NO: | DNA VL | GACATTCAGATGACCCAGTCCCCGAGCTCGCTGTCCG |
| 2214 | | CCTCCGTGGGAGACAGAGTGACAATCACTTGCAAGA |
| | | GCAGCCAGTCACTGTTGTACTCCGAGAACAAGAAGA |
| | | ACTACCTCGCCTGGTACCAGCAGAAGCCGGGAAAGG |
| | | TCCCTAAGCTGCTGATCTTCTGGGCCAGCACTAGGGA |
| | | GTCGGGAGTGCCGTCACGGTTCAGCGGATCGGGATC |
| | | GGGTACCGACTTCACCCTGACTATCTCCTCCCTGCAA |
| | | CCTGAGGACGTGGCCACCTACTACTGTCAGCAGTACT |
| | | ACAATTTTCCCACCTTCGGCCAGGGTACCAAGCTGGA |
| | | AATCAAG |
| SEQ ID NO: | Linker | GGGGSGGGGSGGGGSGGGGS |
| 1010 | | |
| SEQ ID NO: | scFv (VH- | QVQLVQSGAEVKKPGASVKVSCKASGFTFRDYYMAW |
| 2215 | linker-VL) | VRQAPGQRLEWMGSISYEGNPYYGDSVKGRVTITRDNS |
| | | ASTLYMELSSLRSEDTAVYYCARHDHNNVDWFAYWG |
| | | QGTLVTVSSGGGGSGGGGSGGGGSGGGGSDIQMTQSPS |
| | | SLSASVGDRVTITCKSSQSLLYSENKKNYLAWYQQKPG |
| | | KVPKLLIFWASTRESGVPSRFSGSGSGTDFTLTISSLQPE |
| | | DVATYYCQQYYNFPTFGQGTKLEIK |
| CD20-3H5k1 | | |
| SEQ ID NO: | VH | EVQLVQSGAEVKKPGESLKISCKGSGFTFRDYYMAWV |
| 2216 | | RQMPGKGLEWMGSISYEGNPYYGDSVKGQVTISRDNSI |
| | | STLYLQWSSLKASDTAMYYCARHDHNNVDWFAYWGQ |
| | | GTLVTVSS |
| SEQ ID NO: | DNA VH | GAAGTCCAACTGGTGCAGTCAGGAGCAGAAGTCAAA |
| 2217 | | AAACCAGGAGAAAGCCTCAAGATCAGCTGCAAGGGC |
| | | TCGGGTTTCACCTTCCGGGACTACTATATGGCCTGGG |
| | | TCAGACAGATGCCGGGAAAGGGACTGGAATGGATGG |
| | | GGTCAATCAGCTACGAGGGCAACCCCTACTACGGAG |
| | | ACTCCGTGAAGGGACAGGTCACAATCTCCCGGGACA |
| | | ACTCGATTTCCACTCTGTATCTGCAATGGAGCTCCCT |
| | | CAAGGCCTCCGACACTGCGATGTACTACTGTGCGCGG |
| | | CATGACCACAACAATGTGGATTGGTTCGCCTACTGGG |
| | | GACAGGGAACCCTCGTGACCGTGTCCAGC |
| SEQ ID NO: | VL | DIQMTQSPSSLSASVGDRVTITCKSSQSLLYSENKKNYL |
| 2213 | | AWYQQKPGKVPKLLIFWASTRESGVPSRFSGSGSGTDF |
| | | TLTISSLQPEDVATYYCQQYYNFPTFGQGTKLEIK |
| SEQ ID NO: | DNA VL | GATATCCAAATGACCCAGTCGCCCTCCTCACTCTCCG |
| 2218 | | CCTCCGTGGGAGATCGCGTGACCATTACTTGCAAGAG |
| | | CTCGCAGTCCCTGCTGTACTCCGAGAACAAGAAGAA |
| | | CTACTTGGCCTGGTACCAGCAGAAGCCCGGCAAAGT |
| | | GCCGAAGCTGCTTATCTTTTGGGCCTCGACCAGGGAA |
| | | AGCGGAGTGCCGTCACGCTTCTCCGGCTCCGGGTCTG |
| | | GCACCGACTTCACTCTGACTATTTCCTCCCTGCAACCT |
| | | GAGGACGTGGCTACCTACTACTGCCAGCAGTACTACA |
| | | ACTTCCCTACCTTCGGCCAAGGGACGAAGCTGGAGAT |
| | | CAAG |
| SEQ ID NO: | Linker | GGGGSGGGGSGGGGSGGGGS |
| 1010 | | |
| SEQ ID NO: | scFv (VH- | EVQLVQSGAEVKKPGESLKISCKGSGFTFRDYYMAWV |
| 2219 | linker-VL) | RQMPGKGLEWMGSISYEGNPYYGDSVKGQVTISRDNSI |
| | | STLYLQWSSLKASDTAMYYCARHDHNNVDWFAYWGQ |
| | | GTLVTVSSGGGGSGGGGSGGGGSGGGGSDIQMTQSPSS |
| | | LSASVGDRVTITCKSSQSLLYSENKKNYLAWYQQKPGK |
| | | VPKLLIFWASTRESGVPSRFSGSGSGTDFTLTISSLQPED |
| | | VATYYCQQYYNFPTFGQGTKLEIK |
| CD20-3H5k3 | | |
| SEQ ID NO: | VH | EVQLVQSGAEVKKPGESLKISCKGSGFTFRDYYMAWV |
| 2216 | | RQMPGKGLEWMGSISYEGNPYYGDSVKGQVTISRDNSI |
| | | STLYLQWSSLKASDTAMYYCARHDHNNVDWFAYWGQ |
| | | GTLVTVSS |
| SEQ ID NO: | DNA VH | GAAGTGCAGTTGGTCCAATCAGGCGCAGAAGTGAAG |
| 2220 | | AAACCCGGAGAATCATTGAAGATTTCGTGCAAAGGA |
| | | AGCGGGTTCACATTCCGCGATTACTACATGGCGTGGG |
| | | TCAGACAGATGCCGGGAAAGGGACTCGAGTGGATGG |
| | | GGTCCATCAGCTACGAAGGAAACCCTTACTACGGGG |
| | | ACTCCGTGAAGGGCCAGGTCACCATCTCCCGCGACA |
| | | ACTCAATCTCCACTCTGTATCTGCAATGGTCGAGCCT |
| | | CAAGGCCTCTGATACTGCGATGTACTACTGCGCTCGG |
| | | CATGACCACAACAACGTGGACTGGTTCGCTTACTGGG |
| | | GACAGGGTACCCTTGTGACCGTGTCCTCC |
| SEQ ID NO: | VL | EIVMTQSPATLSLSPGERATLSCKSSQSLLYSENKKNYL |
| 2221 | | AWYQQKPGQAPRLLIFWASTRESGIPARFSGSGSGTDFT |
| | | LTISSLOPEDLAVYYCQQYYNFPTFGQGTKLEIK |
| SEQ ID NO: | DNA VL | GAGATCGTGATGACTCAGTCCCCTGCCACCCTCTCGC |
| 2222 | | TGTCCCCCGGGGAGAGGGCCACGCTGTCCTGCAAGA |
| | | GCTCCCAGTCACTGCTGTATTCCGAAAACAAGAAGA |
| | | ACTACCTCGCCTGGTACCAACAGAAGCCGGGACAGG |
| | | CCCCGCGGCTTCTGATCTTCTGGGCCTCCACTCGGGA |
| | | GTCCGGCATTCCGGCCCGCTTCTCCGGCTCGGGGAGC |
| | | GGAACTGACTTCACCCTGACCATCAGCAGCCTGCAGC |
| | | CAGAGGACCTCGCAGTGTACTACTGTCAACAGTACTA |
| | | CAATTTCCCCACCTTTGGCCAGGGTACCAAGCTGGAG |
| | | ATTAAG |
| SEQ ID NO: | Linker | GGGGSGGGGSGGGGSGGGGS |
| 1010 | | |
| SEQ ID NO: | scFv (VH- | EVQLVQSGAEVKKPGESLKISCKGSGFTFRDYYMAWV |
| 2223 | linker-VL) | RQMPGKGLEWMGSISYEGNPYYGDSVKGQVTISRDNSI |
| | | STLYLQWSSLKASDTAMYYCARHDHNNVDWFAYWGQ |
| | | GTLVTVSSGGGGSGGGGSGGGGSGGGGSEIVMTQSPAT |
| | | LSLSPGERATLSCKSSQSLLYSENKKNYLAWYQQKPGQ |
| | | APRLLIFWASTRESGIPARFSGSGSGTDFTLTISSLQP |
| | | EDLAVYYCQQYYNFPTFGQGTKLEIK |
| CD20-Ofa | | |
| SEQ ID NO: | HCDR1 | DYAMH |
| 1120 (Kabat) | | |
| SEQ ID NO: | HCDR2 | TISWNSGSIGYADSVKG |
| 2224 (Kabat) | | |
| SEQ ID NO: | HCDR3 | DIQYGNYYYGMDV |
| 2225 (Kabat) | | |
| SEQ ID NO: | HCDR1 | GFTFNDY |
| 2226 (Chothia) | | |
| SEQ ID NO: | HCDR2 | SWNSGS |
| 2227 (Chothia) | | |
| SEQ ID NO: | HCDR3 | DIQYGNYYYGMDV |
| 2225 (Chothia) | | |
| SEQ ID NO: | HCDR1 | GFTFNDYA |
| 2228 (IMGT) | | |
| SEQ ID NO: | HCDR2 | ISWNSGSI |
| 2229 (IMGT) | | |
| SEQ ID NO: | HCDR3 | AKDIQYGNYYYGMDV |
| 2230 (IMGT) | | |
| SEQ ID NO: | VH | EVOLVESGGGLVQPGRSLRLSCAASGFTFNDYAMHWV |
| 2231 | | RQAPGKGLEWVSTISWNSGSIGYADSVKGRFTISRDNA |
| | | KKSLYLQMNSLRAEDTALYYCAKDIQYGNYYYGMDV |
| | | WGQGTTVTVSS |
| SEQ ID NO: | DNA VH | GAGGTGCAGCTGGTCGAGTCGGGGGGAGGATTGGTG |
| 2232 | | CAGCCGGGCAGAAGCCTGCGGCTCTCATGTGCCGCCT |
| | | CCGGCTTCACCTTTAACGACTACGCAATGCACTGGGT |
| | | CAGACAGGCTCCTGGGAAGGGCCTGGAATGGGTGTC |
| | | CACCATTTCCTGGAACTCCGGGAGCATCGGCTACGCT |
| | | GACTCCGTGAAGGGCCGCTTCACGATTAGCCGCGATA |
| | | ACGCGAAAAAGAGCCTGTACCTCCAAATGAACTCCC |
| | | TGCGGGCCGAAGATACCGCCCTTTACTACTGCGCGAA |
| | | GGACATTCAGTATGGAAACTACTACTACGGAATGGA |
| | | CGTCTGGGGACAGGGGACCACAGTGACCGTGTCAAG |
| | | C |
| SEQ ID NO: | LCDRI | RASQSVSSYLA |
| 2233 (Kabat) | | |
| SEQ ID NO: | LCDR2 | DASNRAT |
| 1287 (Kabat) | | |
| SEQ ID NO: | LCDR3 | QQRSNWPIT |
| 2234 (Kabat) | | |
| SEQ ID NO: | LCDR1 | SQSVSSY |
| 2235 (Chothia) | | |
| SEQ ID NO: | LCDR2 | DAS |
| 2236 (Chothia) | | |
| SEQ ID NO: | LCDR3 | RSNWPI |
| 2237 (Chothia) | | |
| SEQ ID NO: | LCDR1 | QSVSSY |
| 2238 (IMGT) | | |
| SEQ ID NO: | LCDR2 | DAS |
| 2236 (IMGT) | | |
| SEQ ID NO: | LCDR3 | QQRSNWPIT |
| 2234 (IMGT) | | |
| SEQ ID NO: | VL | EIVLTQSPATLSLSPGERATLSCRASQSVSSYLAWYQQK |
| 2239 | | PGQAPRLLIYDASNRATGIPARFSGSGSGTDFTLTISSLEP |
| | | EDFAVYYCQQRSNWPITFGQGTRLEIK |
| SEQ ID NO: | DNA VL | GAAATCGTGCTGACCCAGAGCCCAGCCACTTTGTCAC |
| 2240 | | TGTCCCCCGGCGAAAGAGCCACTCTGTCCTGCCGGGC |
| | | ATCGCAGTCCGTGTCGTCCTACCTGGCCTGGTACCAG |
| | | CAAAAGCCCGGACAAGCCCCTCGCCTTCTCATCTACG |
| | | ACGCCTCCAATCGCGCGACCGGAATCCCGGCCAGGTT |
| | | CTCCGGGAGCGGTTCAGGCACTGACTTCACCCTGACC |
| | | ATCTCGTCCCTGGAGCCGGAGGATTTCGCCGTGTATT |
| | | ACTGCCAGCAGCGGTCCAACTGGCCCATCACCTTCGG |
| | | CCAAGGGACTCGGCTCGAAATCAAG |
| SEQ ID NO: | Linker | GGGGSGGGGSGGGGSGGGGS |
| 1010 | | |
| SEQ ID NO: | scFv (VH- | EVQLVESGGGLVQPGRSLRLSCAASGFTFNDYAMHWV |
| 2241 | linker-VL) | RQAPGKGLEWVSTISWNSGSIGYADSVKGRFTISRDNA |
| | | KKSLYLQMNSLRAEDTALYYCAKDIQYGNYYYGMDV |
| | | WGQGTTVTVSSGGGGSGGGGSGGGGSGGGGSEIVLTQ |
| | | SPATLSLSPGERATLSCRASQSVSSYLAWYQQKPGQAP |
| | | RLLIYDASNRATGIPARFSGSGSGTDFTLTISSLEPEDFAV |
| | | YYCQQRSNWPITFGQGTRLEIK |
| SEQ ID NO: | DNA scFv | GAGGTGCAGCTGGTCGAGTCGGGGGGAGGATTGGTG |
| 2242 | (VH-linker- | CAGCCGGGCAGAAGCCTGCGGCTCTCATGTGCCGCCT |
| | VL) | CCGGCTTCACCTTTAACGACTACGCAATGCACTGGGT |
| | | CAGACAGGCTCCTGGGAAGGGCCTGGAATGGGTGTC |
| | | CACCATTTCCTGGAACTCCGGGAGCATCGGCTACGCT |
| | | GACTCCGTGAAGGGCCGCTTCACGATTAGCCGCGATA |
| | | ACGCGAAAAAGAGCCTGTACCTCCAAATGAACTCCC |
| | | TGCGGGCCGAAGATACCGCCCTTTACTACTGCGCGAA |
| | | GGACATTCAGTATGGAAACTACTACTACGGAATGGA |
| | | CGTCTGGGGACAGGGGACCACAGTGACCGTGTCAAG |
| | | CGGCGGTGGAGGATCTGGCGGAGGAGGTTCCGGTGG |
| | | CGGTGGATCGGGAGGGGGAGGATCGGAAATCGTGCT |
| | | GACCCAGAGCCCAGCCACTTTGTCACTGTCCCCCGGC |
| | | GAAAGAGCCACTCTGTCCTGCCGGGCATCGCAGTCCG |
| | | TGTCGTCCTACCTGGCCTGGTACCAGCAAAAGCCCGG |
| | | ACAAGCCCCTCGCCTTCTCATCTACGACGCCTCCAAT |
| | | CGCGCGACCGGAATCCCGGCCAGGTTCTCCGGGAGC |
| | | GGTTCAGGCACTGACTTCACCCTGACCATCTCGTCCC |
| | | TGGAGCCGGAGGATTTCGCCGTGTATTACTGCCAGCA |
| | | GCGGTCCAACTGGCCCATCACCTTCGGCCAAGGGACT |
| | | CGGCTCGAAATCAAG |
| CD20-3 | | |
| SEQ ID NO: | VH | EVQLVESGGGLVQPGRSLKLSCAASGFTFRDYYMAWV |
| 2243 | | RQAPKKGLEWVASISYEGNPYYGDSVKGRFTISRNNAK |
| | | STLYLQMNSLRSEDTATYYCARHDHNNVDWFAYWGQ |
| | | GTLVTVSS |
| SEQ ID NO: | VL | DIVMTQTPSSQAVSAGEKVTMSCKSSQSLLYSENKKNY |
| 2244 | | LAWYQQKPGQSPKLLIFWASTRESGVPDRFIGSGSGTDF |
| | | TLTISSVQAEDLAVYYCQQYYNFPTFGSGTKLEIK |
| SEQ ID NO: | Linker | GGGGSGGGGSGGGGSGGGGS |
| 1010 | | |
| SEQ ID NO: | scFv (VH- | EVQLVESGGGLVQPGRSLKLSCAASGFTFRDYYMAWV |
| 2245 | linker-VL) | RQAPKKGLEWVASISYEGNPYYGDSVKGRFTISRNNAK |
| | | STLYLQMNSLRSEDTATYYCARHDHNNVDWFAYWGQ |
| | | GTLVTVSSGGGGSGGGGSGGGGSGGGGSDIVMTQTPSS |
| | | QAVSAGEKVTMSCKSSQSLLYSENKKNYLAWYQQKPG |
| | | QSPKLLIFWASTRESGVPDRFIGSGSGTDFTLTISSVQAE |
| | | DLAVYYCQQYYNFPTFGSGTKLEIK |
| CD20-8aBBz | | |
| SEQ ID NO: | VH | EVQLQQSGAELVKPGASVKMSCKASGYTFTSYNMHW |
| 2246 | | VKQTPGQGLEWIGAIYPGNGDTSYNQKFKGKATLTAD |
| | | KSSSTAYMQLSSLTSEDSADYYCARSNYYGSSYWFFDV |
| | | WGAGTTVTVSS |
| SEQ ID NO: | DNA VH | GAGGTGCAACTGCAGCAGTCAGGAGCAGAACTGGTC |
| 2247 | | AAGCCGGGCGCATCCGTCAAGATGAGCTGCAAGGCC |
| | | TCAGGATACACCTTCACTTCATACAACATGCACTGGG |
| | | TCAAGCAGACGCCTGGGCAGGGGCTGGAGTGGATCG |
| | | GTGCCATCTACCCCGGAAACGGCGACACCTCCTACAA |
| | | CCAGAAGTTCAAGGGAAAGGCCACCCTCACCGCTGA |
| | | TAAGTCCAGCAGCACCGCCTACATGCAACTGTCGTCC |
| | | CTGACTTCGGAGGACAGCGCTGACTACTATTGCGCCC |
| | | GCTCTAATTACTACGGTTCCTCCTACTGGTTCTTCGAC |
| | | GTGTGGGGCGCGGGTACCACTGTGACTGTCTCCAGC |
| SEQ ID NO: | VL | DIVLTQSPAILSASPGEKVTMTCRASSSVNYMDWYQKK |
| 2248 | | PGSSPKPWIYATSNLASGVPARFSGSGSGTSYSLTISRVE |
| | | AEDAATYYCQQWSFNPPTFGGGTKLEIK |
| SEQ ID NO: | DNA VL | GACATCGTGCTCACTCAGTCGCCCGCCATTCTGAGCG |
| 2249 | | CTAGCCCCGGCGAAAAGGTCACCATGACCTGTAGAG |
| | | CGTCATCCTCGGTGAACTACATGGACTGGTACCAGAA |
| | | GAAGCCGGGATCGAGCCCTAAGCCATGGATCTACGC |
| | | CACATCCAATCTGGCGTCCGGCGTGCCGGCCCGGTTC |
| | | AGCGGGAGCGGCTCAGGCACCTCCTATTCCCTCACCA |
| | | TCTCGAGAGTGGAGGCTGAGGATGCAGCCACGTACT |
| | | ACTGTCAGCAGTGGTCGTTCAACCCCCCAACCTTTGG |
| | | TGGTGGAACCAAGCTGGAAATCAAG |
| SEQ ID NO: | Linker | GSTSGGGSGGGSGGGGSS |
| 2250 | | |
| SEQ ID NO: | scFv (VH- | DIVLTQSPAILSASPGEKVTMTCRASSSVNYMDWYQKK |
| 2251 | linker-VL) | PGSSPKPWIYATSNLASGVPARFSGSGSGTSYSLTISRVE |
| | | AEDAATYYCQQWSFNPPTFGGGTKLEIKGSTSGGGSGG |
| | | GSGGGGSSEVQLQQSGAELVKPGASVKMSCKASGYTF |
| | | TSYNMHWVKQTPGQGLEWIGAIYPGNGDTSYNQKFKG |
| | | KATLTADKSSSTAYMQLSSLTSEDSADYYCARSNYYGS |
| | | SYWFFDVWGAGTTVTVSS |
| SEQ ID NO: | DNA scFv | GACATCGTGCTCACTCAGTCGCCCGCCATTCTGAGCG |
| 2252 | (VH-linker- | CTAGCCCCGGCGAAAAGGTCACCATGACCTGTAGAG |
| | VL) | CGTCATCCTCGGTGAACTACATGGACTGGTACCAGAA |
| | | GAAGCCGGGATCGAGCCCTAAGCCATGGATCTACGC |
| | | CACATCCAATCTGGCGTCCGGCGTGCCGGCCCGGTTC |
| | | AGCGGGAGCGGCTCAGGCACCTCCTATTCCCTCACCA |
| | | TCTCGAGAGTGGAGGCTGAGGATGCAGCCACGTACT |
| | | ACTGTCAGCAGTGGTCGTTCAACCCCCCAACCTTTGG |
| | | TGGTGGAACCAAGCTGGAAATCAAGGGAAGCACCTC |
| | | CGGCGGAGGTTCCGGAGGAGGGTCCGGAGGCGGAGG |
| | | CAGCTCCGAGGTGCAACTGCAGCAGTCAGGAGCAGA |
| | | ACTGGTCAAGCCGGGCGCATCCGTCAAGATGAGCTG |
| | | CAAGGCCTCAGGATACACCTTCACTTCATACAACATG |
| | | CACTGGGTCAAGCAGACGCCTGGGCAGGGGCTGGAG |
| | | TGGATCGGTGCCATCTACCCCGGAAACGGCGACACCT |
| | | CCTACAACCAGAAGTTCAAGGGAAAGGCCACCCTCA |
| | | CCGCTGATAAGTCCAGCAGCACCGCCTACATGCAACT |
| | | GTCGTCCCTGACTTCGGAGGACAGCGCTGACTACTAT |
| | | TGCGCCCGCTCTAATTACTACGGTTCCTCCTACTGGTT |
| | | CTTCGACGTGTGGGGCGCGGGTACCACTGTGACTGTC |
| | | TCCAGC |

[0497] In some embodiments, the antigen-binding domain comprises a HC CDR1, a HC CDR2, and a HC CDR3 of any heavy chain binding domain amino acid sequences listed in Table 9. In embodiments, the antigen-binding domain further comprises a LC CDR1, a LC CDR2, and a LC CDR3. In embodiments, the antigen-binding domain comprises a LC CDR1, a LC CDR2, and a LC CDR3 amino acid sequences listed in Table 9.

[0498] In some embodiments, the antigen-binding domain comprises one, two or all of LC CDR1, LC CDR2, and LC CDR3 of any light chain binding domain amino acid sequences listed in Table 9, and one, two or all of HC CDR1, HC CDR2, and HC CDR3 of any heavy chain binding domain amino acid sequences listed in Table 9.

[0499] In some embodiments, the CDRs are defined according to the Kabat numbering scheme, the Chothia numbering scheme, or a combination thereof.

### CD22 CAR and CD22-Binding Sequences

[0500] In some embodiments, the CAR or CAR-expressing cell described herein is a CD22 CAR-expressing cell (e.g., a cell expressing a CAR molecule that binds to human CD22). In some embodiments, the CD22 CAR-expressing cell includes an antigen-binding domain according to WO2016/164731 and PCT/US2017/055627, incorporated herein by reference. Exemplary CD22-binding sequences or CD22 CAR sequences are disclosed in, e.g., Tables 6A, 6B, 7A, 7B, 7C, 8A, 8B, 9A, 9B, 10A, and 10B of WO2016/164731 and Tables 6-10 of PCT/US2017/055627. In some embodiments, the CD22-binding sequences or CD22 CAR sequences comprise a CDR, variable region, scFv or full-length sequence of a CD22 CAR disclosed in PCT/US2017/055627 or WO2016/164731.

[0501] In embodiments, the CAR molecule comprises an antigen-binding domain that binds specifically to CD22 (CD22 CAR). In some embodiments, the antigen-binding domain targets human CD22. In some embodiments, the antigen-binding domain includes a single chain Fv sequence as described herein.

[0502] The sequences of exemplary human CD22 CAR are provided below. In some embodiments, a human CD22 CAR is CAR22-65.

Exemplary human CD22 CAR scFv sequence
(SEQ ID NO: 2253)
EVQLQQSGPGLVKPSQTLSLTCAISGDSMLSNSDTWNWIRQSPSRGLEW
LGRTYHRSTWYDDYASSVRGRVSINVDTSKNQYSLQLNAVTPEDTGVYY
CARVRLQDGNSWSDAFDVWGQGTMVTVSSGGGGSGGGGSGGGGSQSALT
QPASASGSPGQSVTISCTGTSSDVGGYNYVSWYQQHPGKAPKLMIYDVS
NRPSGVSNRFSGSKSGNTASLTISGLQAEDEADYYCSSYTSSSTLYVFG
TGTQLTVL
Exemplary human CD22 CAR heavy chain variable
region
(SEQ ID NO: 2254)
EVQLQQSGPGLVKPSQTLSLTCAISGDSMLSNSDTWNWIRQSPSRGLEW
LGRTYHRSTWYDDYASSVRGRVSINVDTSKNQYSLQLNAVTPEDTGVYY
CARVRLQDGNSWSDAFDVWGQGTMVTVSS
Exemplary human CD22 CAR light chain variable
region
(SEQ ID NO: 2255)
QSALTQPASASGSPGQSVTISCTGTSSDVGGYNYVSWYQQHPGKAPKLM
IYDVSNRPSGVSNRFSGSKSGNTASLTISGLQAEDEADYYCSSYTSSST
LYVFGTGTQLTVL

TABLE 10
Exemplary Heavy Chain Variable Domain CDRs of CD22 CAR (CAR22-65)

| | | SEQ ID | | SEQ ID | | SEQ ID |
|---|---|---|---|---|---|---|
| Candidate | HCDR1 | NO: | HCDR2 | NO: | HCDR3 | NO: |
| CAR22-65 | GDSML | 2256 | RTYHRSTWYDDYA | 2258 | VRLQDGNSWS | 2259 |
| Combined | SNSDTWN | | SSVRG | | DAFDV | |
| CAR22-65 | SNSDT | 2257 | RTYHRSTWYDDYA | 2258 | VRLQDGNSWS | 2259 |
| Kabat | WN | | SSVRG | | DAFDV | |

TABLE 11
Exemplary Light Chain Variable Domain CDRs of
CD22 CAR (CAR22-65). The LC CDR sequences in
this table have the same sequence under the
Kabat or combined definitions.

| | | SEQ | | SEQ | | SEQ |
|---|---|---|---|---|---|---|
| | | ID | | ID | | ID |
| Candidate | LCDR1 | NO: | LCDR2 | NO: | LCDR3 | NO: |
| CAR22-65 | TGTSSDVGGY | 2260 | DVSNRPS | 2261 | SSYTSSS | 2262 |
| Combined | NYVS | | | | TLYV | |

[0503] In some embodiments, the antigen-binding domain comprises a HC CDR1, a HC CDR2, and a HC CDR3 of any heavy chain binding domain amino acid sequences listed in Table 10. In embodiments, the antigen-binding domain further comprises a LC CDR1, a LC CDR2, and a LC CDR3. In embodiments, the antigen-binding domain comprises a LC CDR1, a LC CDR2, and a LC CDR3 amino acid sequences listed in Table 11.

[0504] In some embodiments, the antigen-binding domain comprises one, two or all of LC CDR1, LC CDR2, and LC CDR3 of any light chain binding domain amino acid sequences listed in Table 11, and one, two or all of HC CDR1, HC CDR2, and HC CDR3 of any heavy chain binding domain amino acid sequences listed in Table 10.

[0505] In some embodiments, the CDRs are defined according to the Kabat numbering scheme, the Chothia numbering scheme, or a combination thereof.

[0506] The order in which the VL and VH domains appear in the scFv can be varied (i.e., VL-VH, or VH-VL orientation), and where any of one, two, three or four copies of the “G4S” (SEQ ID NO: 1039) subunit, in which each subunit comprises the sequence GGGGS (SEQ ID NO: 1039) (e.g., (G4S)₃ (SEQ ID NO: 1011) or (G4S)₄(SEQ ID NO: 1010)), can connect the variable domains to create the entirety of the scFv domain. Alternatively, the CAR construct can include, for example, a linker including the sequence GSTSGSGKPGSGEGSTKG (SEQ ID NO: 2263). Alternatively, the CAR construct can include, for example, a linker including the sequence LAEAAAK (SEQ ID NO: 2264). In some embodiments, the CAR construct does not include a linker between the VL and VH domains.

[0507] These clones all contained a Q/K residue change in the signal domain of the co-stimulatory domain derived from CD3zeta chain.

### RNA Transfection

[0508] Disclosed herein are methods for producing an in vitro transcribed RNA CAR molecule. The present disclosure also includes a CAR construct encoding RNA construct that can be directly transfected into a cell. A method for generating mRNA for use in transfection can involve in vitro transcription (IVT) of a template with specially designed primers, followed by polyA addition, to produce a construct containing 3′ and 5′ untranslated sequence (“UTR”), a 5′ cap and/or Internal Ribosome Entry Site (IRES), the nucleic acid to be expressed, and a polyA tail, typically 50-2000 bases (SEQ ID NO: 1468) in length. RNA so produced can efficiently transfect different kinds of cells. In some embodiments, the template includes sequences for the CAR construct.

[0509] In some embodiments, the CAR molecule is encoded by a messenger RNA (mRNA). In some embodiments, the mRNA encoding the CAR molecule is introduced into an immune effector cell, e.g., a T cell or a NK cell, for production of a CAR-expressing cell (e.g., CAR T cell or CAR-expressing NK cell).

[0510] In some embodiments, the in vitro transcribed RNA CAR can be introduced to a cell as a form of transient transfection. The RNA is produced by in vitro transcription using a polymerase chain reaction (PCR)-generated template. DNA of interest from any source can be directly converted by PCR into a template for in vitro mRNA synthesis using appropriate primers and RNA polymerase. The source of the DNA can be, for example, genomic DNA, plasmid DNA, phage DNA, cDNA, synthetic DNA sequence or any other appropriate source of DNA. The desired template for in vitro transcription is a CAR of the present disclosure. For example, the template for the RNA CAR comprises an extracellular region comprising a single chain variable domain of an anti-tumor antibody; a hinge region, a transmembrane domain (e.g., a transmembrane domain of CD8a); and a cytoplasmic region that includes an intracellular signaling domain, e.g., comprising the signaling domain of CD3-zeta and the signaling domain of 4-1BB.

[0511] In some embodiments, the DNA to be used for PCR contains an open reading frame. The DNA can be from a naturally occurring DNA sequence from the genome of an organism. In some embodiments, the nucleic acid can include some or all of the 5′ and/or 3′ untranslated regions (UTRs). The nucleic acid can include exons and introns. In some embodiments, the DNA to be used for PCR is a human nucleic acid sequence. In some embodiments, the DNA to be used for PCR is a human nucleic acid sequence including the 5′ and 3′ UTRs. The DNA can alternatively be an artificial DNA sequence that is not normally expressed in a naturally occurring organism. An exemplary artificial DNA sequence is one that contains portions of genes that are ligated together to form an open reading frame that encodes a fusion protein. The portions of DNA that are ligated together can be from a single organism or from more than one organism.

[0512] PCR is used to generate a template for in vitro transcription of mRNA which is used for transfection. Methods for performing PCR are well known in the art. Primers for use in PCR are designed to have regions that are substantially complementary to regions of the DNA to be used as a template for the PCR. “Substantially complementary,” as used herein, refers to sequences of nucleotides where a majority or all of the bases in the primer sequence are complementary, or one or more bases are non-complementary, or mismatched. Substantially complementary sequences are able to anneal or hybridize with the intended DNA target under annealing conditions used for PCR. The primers can be designed to be substantially complementary to any portion of the DNA template. For example, the primers can be designed to amplify the portion of a nucleic acid that is normally transcribed in cells (the open reading frame), including 5′ and 3′ UTRs. The primers can also be designed to amplify a portion of a nucleic acid that encodes a particular domain of interest. In some embodiments, the primers are designed to amplify the coding region of a human cDNA, including all or portions of the 5′ and 3′ UTRs. Primers useful for PCR can be generated by synthetic methods that are well known in the art. “Forward primers” are primers that contain a region of nucleotides that are substantially complementary to nucleotides on the DNA template that are upstream of the DNA sequence that is to be amplified. “Upstream” is used herein to refer to a location 5, to the DNA sequence to be amplified relative to the coding strand. “Reverse primers” are primers that contain a region of nucleotides that are substantially complementary to a double-stranded DNA template that are downstream of the DNA sequence that is to be amplified. “Downstream” is used herein to refer to a location 3′ to the DNA sequence to be amplified relative to the coding strand.

[0513] Any DNA polymerase useful for PCR can be used in the methods disclosed herein. The reagents and polymerase are commercially available from a number of sources.

[0514] Chemical structures with the ability to promote stability and/or translation efficiency may also be used. The RNA preferably has 5′ and 3′ UTRs. In some embodiments, the 5′ UTR is between one and 3000 nucleotides in length. The length of 5′ and 3′ UTR sequences to be added to the coding region can be altered by different methods, including, but not limited to, designing primers for PCR that anneal to different regions of the UTRs. Using this approach, one of ordinary skill in the art can modify the 5′ and 3′ UTR lengths required to achieve optimal translation efficiency following transfection of the transcribed RNA.

[0515] The 5′ and 3′ UTRs can be the naturally occurring, endogenous 5′ and 3′ UTRs for the nucleic acid of interest. Alternatively, UTR sequences that are not endogenous to the nucleic acid of interest can be added by incorporating the UTR sequences into the forward and reverse primers or by any other modifications of the template. The use of UTR sequences that are not endogenous to the nucleic acid of interest can be useful for modifying the stability and/or translation efficiency of the RNA. For example, it is known that AU-rich elements in 3′ UTR sequences can decrease the stability of mRNA. Therefore, 3′ UTRs can be selected or designed to increase the stability of the transcribed RNA based on properties of UTRs that are well known in the art.

[0516] In some embodiments, the 5′ UTR can contain the Kozak sequence of the endogenous nucleic acid. Alternatively, when a 5′ UTR that is not endogenous to the nucleic acid of interest is being added by PCR as described above, a consensus Kozak sequence can be redesigned by adding the 5′ UTR sequence. Kozak sequences can increase the efficiency of translation of some RNA transcripts, but does not appear to be required for all RNAs to enable efficient translation. The requirement for Kozak sequences for many mRNAs is known in the art. In other embodiments, the 5′ UTR can be 5′UTR of an RNA virus whose RNA genome is stable in cells. In other embodiments, various nucleotide analogues can be used in the 3′ or 5′ UTR to impede exonuclease degradation of the mRNA.

[0517] To enable synthesis of RNA from a DNA template without the need for gene cloning, a promoter of transcription should be attached to the DNA template upstream of the sequence to be transcribed. When a sequence that functions as a promoter for an RNA polymerase is added to the 5′ end of the forward primer, the RNA polymerase promoter becomes incorporated into the PCR product upstream of the open reading frame that is to be transcribed. In some embodiments, the promoter is a T7 polymerase promoter, as described elsewhere herein. Other useful promoters include, but are not limited to, T3 and SP6 RNA polymerase promoters. Consensus nucleotide sequences for T7, T3 and SP6 promoters are known in the art.

[0518] In some embodiments, the mRNA has both a cap on the 5′ end and a 3′ poly(A) tail which determine ribosome binding, initiation of translation and stability mRNA in the cell. On a circular DNA template, for instance, plasmid DNA, RNA polymerase produces a long concatameric product which is not suitable for expression in eukaryotic cells. The transcription of plasmid DNA linearized at the end of the 3′ UTR results in normal sized mRNA which is not effective in eukaryotic transfection even if it is polyadenylated after transcription.

[0519] On a linear DNA template, phage T7 RNA polymerase can extend the 3′ end of the transcript beyond the last base of the template (Schenborn and Mierendorf, Nuc Acids Res., 13:6223-36 (1985); Nacheva and Berzal-Herranz, Eur. J. Biochem., 270:1485-65 (2003).

[0520] The conventional method of integration of polyA/T stretches into a DNA template is molecular cloning. However, polyA/T sequence integrated into plasmid DNA can cause plasmid instability, which is why plasmid DNA templates obtained from bacterial cells are often highly contaminated with deletions and other aberrations. This makes cloning procedures not only laborious and time consuming but often not reliable. That is why a method which allows construction of DNA templates with polyA/T 3′ stretch without cloning highly desirable.

[0521] The polyA/T segment of the transcriptional DNA template can be produced during PCR by using a reverse primer containing a polyT tail, such as 100T tail (SEQ ID NO: 1469) (size can be 50-5000 T (SEQ ID NO: 1470)), or after PCR by any other method, including, but not limited to, DNA ligation or in vitro recombination. Poly(A) tails also provide stability to RNAs and reduce their degradation. Generally, the length of a poly(A) tail positively correlates with the stability of the transcribed RNA. In some embodiments, the poly(A) tail is between 100 and 5000 adenosines (SEQ ID NO: 1471).

[0522] Poly(A) tails of RNAs can be further extended following in vitro transcription with the use of a poly(A) polymerase, such as E. coli polyA polymerase (E-PAP). In some embodiments, increasing the length of a poly(A) tail from 100 nucleotides to between 300 and 400 nucleotides (SEQ ID NO: 1472) results in about a two-fold increase in the translation efficiency of the RNA. Additionally, the attachment of different chemical groups to the 3′ end can increase mRNA stability. Such attachment can contain modified/artificial nucleotides, aptamers and other compounds. For example, ATP analogs can be incorporated into the poly(A) tail using poly(A) polymerase. ATP analogs can further increase the stability of the RNA.

[0523] 5′ caps on also provide stability to RNA molecules. In some embodiments, RNAs produced by the methods disclosed herein include a 5′ cap. The 5′ cap is provided using techniques known in the art and described herein (Cougot, et al., Trends in Biochem. Sci., 29:436-444 (2001); Stepinski, et al., RNA, 7:1468-95 (2001); Elango, et al., Biochim. Biophys. Res. Commun., 330:958-966 (2005)).

[0524] The RNAs produced by the methods disclosed herein can also contain an internal ribosome entry site (IRES) sequence. The IRES sequence may be any viral, chromosomal or artificially designed sequence which initiates cap-independent ribosome binding to mRNA and facilitates the initiation of translation. Any solutes suitable for cell electroporation, which can contain factors facilitating cellular permeability and viability such as sugars, peptides, lipids, proteins, antioxidants, and surfactants can be included.

[0525] RNA can be introduced into target cells using any of a number of different methods, for instance, commercially available methods which include, but are not limited to, electroporation (Amaxa Nucleofector-II (Amaxa Biosystems, Cologne, Germany)), (ECM 830 (BTX) (Harvard Instruments, Boston, Mass.) or the Gene Pulser II (BioRad, Denver, Colo.), Multiporator (Eppendort, Hamburg Germany), cationic liposome mediated transfection using lipofection, polymer encapsulation, peptide mediated transfection, or biolistic particle delivery systems such as “gene guns” (see, for example, Nishikawa, et al. Hum Gene Ther., 12(8):861-70 (2001).

Non-viral delivery methods

[0526] In some embodiments, non-viral methods can be used to deliver a nucleic acid encoding a CAR molecule described herein into a cell or tissue or a subject.

[0527] In some embodiments, the non-viral method includes the use of a transposon (also called a transposable element). In some embodiments, a transposon is a piece of DNA that can insert itself at a location in a genome, for example, a piece of DNA that is capable of self-replicating and inserting its copy into a genome, or a piece of DNA that can be spliced out of a longer nucleic acid and inserted into another place in a genome. For example, a transposon comprises a DNA sequence made up of inverted repeats flanking genes for transposition.

[0528] Exemplary methods of nucleic acid delivery using a transposon include a Sleeping Beauty transposon system (SBTS) and a piggyBac (PB) transposon system. See, e.g., Aronovich et al. Hum. Mol. Genet. 20.R1(2011):R14-20; Singh et al. Cancer Res. 15(2008):2961-2971; Huang et al. Mol. Ther. 16(2008):580-589; Grabundzija et al. Mol. Ther. 18(2010):1200-1209; Kebriaei et al. Blood. 122.21(2013):166; Williams. Molecular Therapy 16.9(2008):1515-16; Bell et al. Nat. Protoc. 2.12(2007):3153-65; and Ding et al. Cell. 122.3(2005):473-83, all of which are incorporated herein by reference.

[0529] The SBTS includes two components: 1) a transposon containing a transgene and 2) a source of transposase enzyme. The transposase can transpose the transposon from a carrier plasmid (or other donor DNA) to a target DNA, such as a host cell chromosome/genome. For example, the transposase binds to the carrier plasmid/donor DNA, cuts the transposon (including transgene(s)) out of the plasmid, and inserts it into the genome of the host cell. See, e.g., Aronovich et al. supra.

[0530] Exemplary transposons include a pT2-based transposon. See, e.g., Grabundzija et al. Nucleic Acids Res. 41.3(2013):1829-47; and Singh et al. Cancer Res. 68.8(2008): 2961-2971, all of which are incorporated herein by reference. Exemplary transposases include a Tc 1/mariner-type transposase, e.g., the SB10 transposase or the SB11 transposase (a hyperactive transposase which can be expressed, e.g., from a cytomegalovirus promoter). See, e.g., Aronovich et al.; Kebriaei et al.; and Grabundzija et al., all of which are incorporated herein by reference.

[0531] Use of the SBTS permits efficient integration and expression of a transgene, e.g., a nucleic acid encoding a CAR molecule described herein. Provided herein are methods of generating a cell, e.g., T cell or NK cell, that stably expresses a CAR molecule described herein, e.g., using a transposon system such as SBTS.

[0532] In accordance with methods described herein, in some embodiments, one or more nucleic acids, e.g., plasmids, containing the SBTS components are delivered to a cell (e.g., T or NK cell). For example, the nucleic acid(s) are delivered by standard methods of nucleic acid (e.g., plasmid DNA) delivery, e.g., methods described herein, e.g., electroporation, transfection, or lipofection. In some embodiments, the nucleic acid contains a transposon comprising a transgene, e.g., a nucleic acid encoding a CAR molecule described herein. In some embodiments, the nucleic acid contains a transposon comprising a transgene (e.g., a nucleic acid encoding a CAR molecule described herein) as well as a nucleic acid sequence encoding a transposase enzyme. In other embodiments, a system with two nucleic acids is provided, e.g., a dual-plasmid system, e.g., where a first plasmid contains a transposon comprising a transgene, and a second plasmid contains a nucleic acid sequence encoding a transposase enzyme. For example, the first and the second nucleic acids are co-delivered into a host cell.

[0533] In some embodiments, cells, e.g., T or NK cells, are generated that express a CAR molecule described herein by using a combination of gene insertion using the SBTS and genetic editing using a nuclease (e.g., Zinc finger nucleases (ZFNs), Transcription Activator-Like Effector Nucleases (TALENs), the CRISPR/Cas system, or engineered meganuclease re-engineered homing endonucleases).

[0534] In some embodiments, use of a non-viral method of delivery permits reprogramming of cells, e.g., T or NK cells, and direct infusion of the cells into a subject. Advantages of non-viral vectors include but are not limited to the ease and relatively low cost of producing sufficient amounts required to meet a patient population, stability during storage, and lack of immunogenicity.

### Nucleic Acid Constructs Encoding CAR Molecules

[0535] The present disclosure also provides nucleic acid molecules encoding one or more CAR constructs described herein. In some embodiments, the nucleic acid molecule is provided as a messenger RNA transcript. In some embodiments, the nucleic acid molecule is provided as a DNA construct.

[0536] Accordingly, in some embodiments, the disclosure pertains to an isolated nucleic acid molecule encoding a CAR molecule, wherein the CAR molecule comprises an antigen-binding domain, a transmembrane domain, and an intracellular signaling domain comprising a stimulatory domain, e.g., a costimulatory signaling domain and/or a primary signaling domain, e.g., zeta chain.

[0537] The nucleic acid sequences coding for the desired molecules can be obtained using recombinant methods known in the art, such as, for example by screening libraries from cells expressing the gene, by deriving the gene from a vector known to include the same, or by isolating directly from cells and tissues containing the same, using standard techniques. Alternatively, the gene of interest can be produced synthetically, rather than cloned.

[0538] The present disclosure also provides vectors in which a DNA of the present disclosure is inserted. Vectors derived from retroviruses such as the lentivirus are suitable tools to achieve long-term gene transfer since they allow long-term, stable integration of a transgene and its propagation in daughter cells. Lentiviral vectors have the added advantage over vectors derived from onco-retroviruses such as murine leukemia viruses in that they can transduce non-proliferating cells, such as hepatocytes. They also have the added advantage of low immunogenicity. A retroviral vector may also be, e.g., a gammaretroviral vector. A gammaretroviral vector may include, e.g., a promoter, a packaging signal (ψ), a primer binding site (PBS), one or more (e.g., two) long terminal repeats (LTR), and a transgene of interest, e.g., a gene encoding a CAR molecule. A gammaretroviral vector may lack viral structural gens such as gag, pol, and env. Exemplary gammaretroviral vectors include Murine Leukemia Virus (MLV), Spleen-Focus Forming Virus (SFFV), and Myeloproliferative Sarcoma Virus (MPSV), and vectors derived therefrom. Other gammaretroviral vectors are described, e.g., in Tobias Maetzig et al., “Gammaretroviral Vectors: Biology, Technology and Application” Viruses. 2011 June; 3(6): 677-713.

[0539] In some embodiments, the vector comprising the nucleic acid encoding the desired CAR molecule of the disclosure is an adenoviral vector (A5/35). In some embodiments, the expression of nucleic acids encoding CAR IL-15R/IL-15 can be accomplished using of transposons such as sleeping beauty, CRISPR, CAS9, and zinc finger nucleases. See below June et al. 2009Nature Reviews Immunology 9.10: 704-716, is incorporated herein by reference.

[0540] In brief summary, the expression of natural or synthetic nucleic acids CAR is typically achieved by operably linking a nucleic acid encoding the CAR polypeptide or portions thereof to a promoter, and incorporating the construct into an expression vector. The vectors can be suitable for replication and integration eukaryotes. Typical cloning vectors contain transcription and translation terminators, initiation sequences, and promoters useful for regulation of the expression of the desired nucleic acid sequence.

[0541] The expression constructs of the present disclosure may also be used for nucleic acid immunization and gene therapy, using standard gene delivery protocols. Methods for gene delivery are known in the art. See, e.g., U.S. Pat. Nos. 5,399,346, 5,580,859, 5,589,466, incorporated by reference herein in their entireties. In some embodiments, the disclosure provides a gene therapy vector.

[0542] The nucleic acid can be cloned into a number of types of vectors. For example, the nucleic acid can be cloned into a vector including, but not limited to a plasmid, a phagemid, a phage derivative, an animal virus, and a cosmid. Vectors of particular interest include expression vectors, replication vectors, probe generation vectors, and sequencing vectors.

[0543] Further, the expression vector may be provided to a cell in the form of a viral vector. Viral vector technology is well known in the art and is described, for example, in Sambrook et al., 2012, MOLECULAR CLONING: A LABORATORY MANUAL, volumes 1-4, Cold Spring Harbor Press, NY), and in other virology and molecular biology manuals. Viruses, which are useful as vectors include, but are not limited to, retroviruses, adenoviruses, adeno-associated viruses, herpes viruses, and lentiviruses. In general, a suitable vector contains an origin of replication functional in at least one organism, a promoter sequence, convenient restriction endonuclease sites, and one or more selectable markers, (e.g., WO 01/96584; WO 01/29058; and U.S. Pat. No. 6,326,193).

[0544] A number of viral based systems have been developed for gene transfer into mammalian cells. For example, retroviruses provide a convenient platform for gene delivery systems. A selected gene can be inserted into a vector and packaged in retroviral particles using techniques known in the art. The recombinant virus can then be isolated and delivered to cells of the subject either in vivo or ex vivo. A number of retroviral systems are known in the art. In some embodiments, adenovirus vectors are used. A number of adenovirus vectors are known in the art. In some embodiments, lentivirus vectors are used.

[0545] Additional promoter elements, e.g., enhancers, regulate the frequency of transcriptional initiation. Typically, these are located in the region 30-110 bp upstream of the start site, although a number of promoters have been shown to contain functional elements downstream of the start site as well. The spacing between promoter elements frequently is flexible, so that promoter function is preserved when elements are inverted or moved relative to one another. In the thymidine kinase (tk) promoter, the spacing between promoter elements can be increased to 50 bp apart before activity begins to decline. Depending on the promoter, it appears that individual elements can function either cooperatively or independently to activate transcription.

[0546] An example of a promoter that is capable of expressing a CAR transgene in a mammalian T cell is the EF1a promoter. The native EF1a promoter drives expression of the alpha subunit of the elongation factor-1 complex, which is responsible for the enzymatic delivery of aminoacyl tRNAs to the ribosome. The EF1a promoter has been extensively used in mammalian expression plasmids and has been shown to be effective in driving CAR expression from transgenes cloned into a lentiviral vector. See, e.g., Milone et al., Mol. Ther. 17(8): 1453-1464 (2009).

[0547] Another example of a promoter is the immediate early cytomegalovirus (CMV) promoter sequence. This promoter sequence is a strong constitutive promoter sequence capable of driving high levels of expression of any polynucleotide sequence operatively linked thereto. However, other constitutive promoter sequences may also be used, including, but not limited to the simian virus 40 (SV40) early promoter, mouse mammary tumor virus (MMTV), human immunodeficiency virus (HIV) long terminal repeat (LTR) promoter, MoMuLV promoter, an avian leukemia virus promoter, an Epstein-Barr virus immediate early promoter, a Rous sarcoma virus promoter, as well as human gene promoters such as, but not limited to, the actin promoter, the myosin promoter, the elongation factor-1 promoter, the hemoglobin promoter, and the creatine kinase promoter. Further, the disclosure should not be limited to the use of constitutive promoters. Inducible promoters are also contemplated as part of the disclosure. The use of an inducible promoter provides a molecular switch capable of turning on expression of the polynucleotide sequence which it is operatively linked when such expression is desired, or turning off the expression when expression is not desired. Examples of inducible promoters include, but are not limited to a metallothionine promoter, a glucocorticoid promoter, a progesterone promoter, and a tetracycline promoter.

[0548] Another example of a promoter is the phosphoglycerate kinase (PGK) promoter. In embodiments, a truncated PGK promoter (e.g., a PGK promoter with one or more, e.g., 1, 2, 5, 10, 100, 200, 300, or 400, nucleotide deletions when compared to the wild-type PGK promoter sequence) may be desired. The nucleotide sequences of exemplary PGK promoters are provided below.

### Exemplary WT PGK Promoter

(SEQ ID NO: 1473)
ACCCCTCTCTCCAGCCACTAAGCCAGTTGCTCCCTCGGCTGACGGCTGC
ACGCGAGGCCTCCGAACGTCTTACGCCTTGTGGCGCGCCCGTCCTTGTC
CCGGGTGTGATGGCGGGGTGTGGGGCGGAGGGCGTGGCGGGGAAGGGCC
GGCGACGAGAGCCGCGCGGGACGACTCGTCGGCGATAACCGGTGTCGGG
TAGCGCCAGCCGCGCGACGGTAACGAGGGACCGCGACAGGCAGACGCTC
CCATGATCACTCTGCACGCCGAAGGCAAATAGTGCAGGCCGTGCGGCGC
TTGGCGTTCCTTGGAAGGGCTGAATCCCCGCCTCGTCCTTCGCAGCGGC
CCCCCGGGTGTTCCCATCGCCGCTTCTAGGCCCACTGCGACGCTTGCCT
GCACTTCTTACACGCTCTGGGTCCCAGCCGCGGCGACGCAAAGGGCCTT
GGTGCGGGTCTCGTCGGCGCAGGGACGCGTTTGGGTCCCGACGGAACCT
TTTCCGCGTTGGGGTTGGGGCACCATAAGCT

### Exemplary Truncated PGK Promoters:

PGK100:
(SEQ ID NO: 1474)
ACCCCTCTCTCCAGCCACTAAGCCAGTTGCTCCCTCGGCTGACGGCTGC
ACGCGAGGCCTCCGAACGTCTTACGCCTTGTGGCGCGCCCGTCCTTGTC
CCGGGTGTGATGGCGGGGTG
PGK200:
(SEQ ID NO: 1475)
ACCCCTCTCTCCAGCCACTAAGCCAGTTGCTCCCTCGGCTGACGGCTGC
ACGCGAGGCCTCCGAACGTCTTACGCCTTGTGGCGCGCCCGTCCTTGTC
CCGGGTGTGATGGCGGGGTGTGGGGCGGAGGGCGTGGCGGGGAAGGGCC
GGCGACGAGAGCCGCGCGGGACGACTCGTCGGCGATAACCGGTGTCGGG
TAGCGCCAGCCGCGCGACGGTAACG
PGK300:
(SEQ ID NO: 1476)
ACCCCTCTCTCCAGCCACTAAGCCAGTTGCTCCCTCGGCTGACGGCTGC
ACGCGAGGCCTCCGAACGTCTTACGCCTTGTGGCGCGCCCGTCCTTGTC
CCGGGTGTGATGGCGGGGTGTGGGGCGGAGGGCGTGGCGGGGAAGGGCC
GGCGACGAGAGCCGCGCGGGACGACTCGTCGGCGATAACCGGTGTCGGG
TAGCGCCAGCCGCGCGACGGTAACGAGGGACCGCGACAGGCAGACGCTC
CCATGATCACTCTGCACGCCGAAGGCAAATAGTGCAGGCCGTGCGGCGC
TTGGCGTTCCTTGGAAGGGCTGAATCCCCG
PGK400:
(SEQ ID NO: 1477)
ACCCCTCTCTCCAGCCACTAAGCCAGTTGCTCCCTCGGCTGACGGCTGC
ACGCGAGGCCTCCGAACGTCTTACGCCTTGTGGCGCGCCCGTCCTTGTC
CCGGGTGTGATGGCGGGGTGTGGGGCGGAGGGCGTGGCGGGGAAGGGCC
GGCGACGAGAGCCGCGCGGGACGACTCGTCGGCGATAACCGGTGTCGGG
TAGCGCCAGCCGCGCGACGGTAACGAGGGACCGCGACAGGCAGACGCTC
CCATGATCACTCTGCACGCCGAAGGCAAATAGTGCAGGCCGTGCGGCGC
TTGGCGTTCCTTGGAAGGGCTGAATCCCCGCCTCGTCCTTCGCAGCGGC
CCCCCGGGTGTTCCCATCGCCGCTTCTAGGCCCACTGCGACGCTTGCCT
GCACTTCTTACACGCTCTGGGTCCCAGCCG

[0551] A vector may also include, e.g., a signal sequence to facilitate secretion, a polyadenylation signal and transcription terminator (e.g., from Bovine Growth Hormone (BGH) gene), an element allowing episomal replication and replication in prokaryotes (e.g. SV40 origin and ColE1 or others known in the art) and/or elements to allow selection (e.g., ampicillin resistance gene and/or zeocin marker).

[0552] In order to assess the expression of a CAR polypeptide or portions thereof, the expression vector to be introduced into a cell can also contain either a selectable marker gene or a reporter gene or both to facilitate identification and selection of expressing cells from the population of cells sought to be transfected or infected through viral vectors. In other embodiments, the selectable marker may be carried on a separate piece of DNA and used in a co-transfection procedure. Both selectable markers and reporter genes may be flanked with appropriate regulatory sequences to enable expression in the host cells. Useful selectable markers include, for example, antibiotic-resistance genes, such as neo and the like.

[0553] Reporter genes are used for identifying potentially transfected cells and for evaluating the functionality of regulatory sequences. In general, a reporter gene is a gene that is not present in or expressed by the recipient organism or tissue and that encodes a polypeptide whose expression is manifested by some easily detectable property, e.g., enzymatic activity. Expression of the reporter gene is assayed at a suitable time after the DNA has been introduced into the recipient cells. Suitable reporter genes may include genes encoding luciferase, beta-galactosidase, chloramphenicol acetyl transferase, secreted alkaline phosphatase, or the green fluorescent protein gene (e.g., Ui-Tei et al., 2000 FEBS Letters 479: 79-82). Suitable expression systems are well known and may be prepared using known techniques or obtained commercially. In general, the construct with the minimal 5′ flanking region showing the highest level of expression of reporter gene is identified as the promoter. Such promoter regions may be linked to a reporter gene and used to evaluate agents for the ability to modulate promoter-driven transcription.

[0554] In some embodiments, the vector can further comprise a nucleic acid encoding a second CAR molecule. In some embodiments, the second CAR molecule includes an antigen binding domain to a target expressed on acute myeloid leukemia cells, such as, e.g., CD123, CD34, CLL-1, folate receptor beta, or FLT3; or a target expressed on a B cell, e.g., CD10, CD19, CD20, CD22, CD34, CD123, FLT-3, ROR1, CD79b, CD179b, or CD79a. In some embodiments, the vector comprises a nucleic acid sequence encoding a first CAR molecule that specifically binds a first antigen and includes an intracellular signaling domain having a costimulatory signaling domain but not a primary signaling domain, and a nucleic acid encoding a second CAR molecule that specifically binds a second, different, antigen and includes an intracellular signaling domain having a primary signaling domain but not a costimulatory signaling domain.

[0555] In some embodiments, the vector comprises a nucleic acid encoding a CAR molecule described herein and a nucleic acid encoding an inhibitory CAR molecule. In some embodiments, the inhibitory CAR molecule comprises an antigen-binding domain that binds an antigen found on normal cells but not cancer cells. In some embodiments, the inhibitory CAR molecule comprises the antigen-binding domain, a transmembrane domain and an intracellular domain of an inhibitory molecule. For example, the intracellular domain of the inhibitory CAR molecule can be an intracellular domain of PD1, PD-L1, PD-L2, CTLA4, TIM3, CEACAM (e.g., CEACAM-1, CEACAM-3 and/or CEACAM-5), LAG3, VISTA, BTLA, TIGIT, LAIR1, CD160, 2B4, CD80, CD86, B7-H3 (CD276), B7-H4 (VTCN1), HVEM (TNFRSF14 or CD270), KIR, A2aR, MHC class I, MHC class II, GAL9, adenosine, and TGF beta.

[0556] In embodiments, the vector may comprise two or more nucleic acid sequences encoding a CAR molecule, e.g., a CAR molecule described herein and a second CAR molecule, e.g., an inhibitory CAR molecule or a CAR molecule that specifically binds to a different antigen. In such embodiments, the two or more nucleic acid sequences encoding the CAR molecule are encoded by a single nucleic molecule in the same frame and as a single polypeptide chain. In some embodiments, the two or more CAR molecules, can, e.g., be separated by one or more peptide cleavage sites. (e.g., an auto-cleavage site or a substrate for an intracellular protease). Examples of peptide cleavage sites include the following, wherein the GSG residues are optional:

T2A:
(SEQ ID NO: 1478)
(GSG)EGRGSLLTCGDVEENPGP
P2A:
(SEQ ID NO: 1479)
(GSG)ATNFSLLKQAGDVEENPGP
E2A:
(SEQ ID NO: 1480)
(GSG) QCTNYALLKLAGDVESNPGP
F2A:
(SEQ ID NO: 1481)
(GSG)VKQTLNFDLLKLAGDVESNPGP

[0557] Methods of introducing and expressing genes into a cell are known in the art. In the context of an expression vector, the vector can be readily introduced into a host cell, e.g., mammalian, bacterial, yeast, or insect cell by any method in the art. For example, the expression vector can be transferred into a host cell by physical, chemical, or biological means.

[0558] Physical methods for introducing a polynucleotide into a host cell include calcium phosphate precipitation, lipofection, particle bombardment, microinjection, electroporation, and the like. Methods for producing cells comprising vectors and/or exogenous nucleic acids are well known in the art. See, for example, Sambrook et al., 2012, MOLECULAR CLONING: A LABORATORY MANUAL, volumes 1-4, Cold Spring Harbor Press, NY). A preferred method for the introduction of a polynucleotide into a host cell is calcium phosphate transfection

[0559] Biological methods for introducing a polynucleotide of interest into a host cell include the use of DNA and RNA vectors. Viral vectors, and especially retroviral vectors, have become the most widely used method for inserting genes into mammalian, e.g., human cells. Other viral vectors can be derived from lentivirus, poxviruses, herpes simplex virus I, adenoviruses and adeno-associated viruses, and the like. See, for example, U.S. Pat. Nos. 5,350,674 and 5,585,362.

[0560] Chemical means for introducing a polynucleotide into a host cell include colloidal dispersion systems, such as macromolecule complexes, nanocapsules, microspheres, beads, and lipid-based systems including oil-in-water emulsions, micelles, mixed micelles, and liposomes. An exemplary colloidal system for use as a delivery vehicle in vitro and in vivo is a liposome (e.g., an artificial membrane vesicle). Other methods of state-of-the-art targeted delivery of nucleic acids are available, such as delivery of polynucleotides with targeted nanoparticles or other suitable sub-micron sized delivery system.

[0561] In the case where a non-viral delivery system is utilized, an exemplary delivery vehicle is a liposome. The use of lipid formulations is contemplated for the introduction of the nucleic acids into a host cell (in vitro, ex vivo or in vivo). In some embodiments, the nucleic acid may be associated with a lipid. The nucleic acid associated with a lipid may be encapsulated in the aqueous interior of a liposome, interspersed within the lipid bilayer of a liposome, attached to a liposome via a linking molecule that is associated with both the liposome and the oligonucleotide, entrapped in a liposome, complexed with a liposome, dispersed in a solution containing a lipid, mixed with a lipid, combined with a lipid, contained as a suspension in a lipid, contained or complexed with a micelle, or otherwise associated with a lipid. Lipid, lipid/DNA or lipid/expression vector associated compositions are not limited to any particular structure in solution. For example, they may be present in a bilayer structure, as micelles, or with a “collapsed” structure. They may also simply be interspersed in a solution, possibly forming aggregates that are not uniform in size or shape. Lipids are fatty substances which may be naturally occurring or synthetic lipids. For example, lipids include the fatty droplets that naturally occur in the cytoplasm as well as the class of compounds which contain long-chain aliphatic hydrocarbons and their derivatives, such as fatty acids, alcohols, amines, amino alcohols, and aldehydes.

[0562] Lipids suitable for use can be obtained from commercial sources. For example, dimyristyl phosphatidylcholine (“DMPC”) can be obtained from Sigma, St. Louis, MO; dicetyl phosphate (“DCP”) can be obtained from K & K Laboratories (Plainview, NY); cholesterol (“Choi”) can be obtained from Calbiochem-Behring; dimyristyl phosphatidylglycerol (“DMPG”) and other lipids may be obtained from Avanti Polar Lipids, Inc. (Birmingham, AL.). Stock solutions of lipids in chloroform or chloroform/methanol can be stored at about −20° C. Chloroform is used as the only solvent since it is more readily evaporated than methanol. “Liposome” is a generic term encompassing a variety of single and multilamellar lipid vehicles formed by the generation of enclosed lipid bilayers or aggregates. Liposomes can be characterized as having vesicular structures with a phospholipid bilayer membrane and an inner aqueous medium. Multilamellar liposomes have multiple lipid layers separated by aqueous medium. They form spontaneously when phospholipids are suspended in an excess of aqueous solution. The lipid components undergo self-rearrangement before the formation of closed structures and entrap water and dissolved solutes between the lipid bilayers (Ghosh et al., 1991 Glycobiology 5: 505-10). However, compositions that have different structures in solution than the normal vesicular structure are also encompassed. For example, the lipids may assume a micellar structure or merely exist as nonuniform aggregates of lipid molecules. Also contemplated are lipofectamine-nucleic acid complexes.

[0563] Regardless of the method used to introduce exogenous nucleic acids into a host cell or otherwise expose a cell to the inhibitor of the present disclosure, in order to confirm the presence of the recombinant DNA sequence in the host cell, a variety of assays may be performed. Such assays include, for example, “molecular biological” assays well known to those of skill in the art, such as Southern and Northern blotting, RT-PCR and PCR; “biochemical” assays, such as detecting the presence or absence of a particular peptide, e.g., by immunological means (ELISAs and Western blots) or by assays described herein to identify agents falling within the scope of the disclosure.

[0564] The present disclosure further provides a vector comprising a CAR molecule-encoding nucleic acid molecule. In some embodiments, a CAR vector can be directly transduced into a cell, e.g., a T cell or NK cell. In some embodiments, the vector is a cloning or expression vector, e.g., a vector including, but not limited to, one or more plasmids (e.g., expression plasmids, cloning vectors, minicircles, minivectors, double minute chromosomes), retroviral and lentiviral vector constructs. In some embodiments, the vector is a multicistronic vector. In some embodiments, the vector is capable of expressing the CAR construct in mammalian T cells or NK cells. In some embodiments, the mammalian T cell is a human T cell. In some embodiments, the mammalian NK cell is a human NK cell. In some embodiments, the T cell is autologous. In some embodiments, the T cell is allogeneic.

### Sources of Cells

[0565] Prior to expansion and genetic modification, a source of cells, e.g., immune effector cells (e.g., T cells or NK cells), is obtained from a subject. The term “subject” is intended to include living organisms in which an immune response can be elicited (e.g., mammals). Examples of subjects include humans, dogs, cats, mice, rats, and transgenic species thereof. T cells can be obtained from a number of sources, including peripheral blood mononuclear cells, bone marrow, lymph node tissue, cord blood, thymus tissue, tissue from a site of infection, ascites, pleural effusion, spleen tissue, and tumors.

[0566] In certain embodiments of the present disclosure, any number of immune effector cell (e.g., T cell or NK cell) lines available in the art, may be used. In certain embodiments of the present disclosure, T cells can be obtained from a unit of blood collected from a subject using any number of techniques known to the skilled artisan, such as Ficoll™ separation. In some embodiments, cells from the circulating blood of an individual are obtained by apheresis. The apheresis product typically contains lymphocytes, including T cells, monocytes, granulocytes, B cells, other nucleated white blood cells, red blood cells, and platelets. In some embodiments, the cells collected by apheresis may be washed to remove the plasma fraction and to place the cells in an appropriate buffer or media for subsequent processing steps. In some embodiments of the disclosure, the cells are washed with phosphate buffered saline (PBS). In some embodiments, the wash solution lacks calcium and may lack magnesium or may lack many if not all divalent cations.

[0567] Initial activation steps in the absence of calcium can lead to magnified activation. As those of ordinary skill in the art would readily appreciate a washing step may be accomplished by methods known to those in the art, such as by using a semi-automated “flow-through” centrifuge (for example, the Cobe 2991 cell processor, the Baxter CytoMate, or the Haemonetics Cell Saver 5) according to the manufacturer's instructions. After washing, the cells may be resuspended in a variety of biocompatible buffers, such as, for example, Ca-free, Mg-free PBS, PlasmaLyte A, or other saline solution with or without buffer. Alternatively, the undesirable components of the apheresis sample may be removed and the cells directly resuspended in culture media.

[0568] It is recognized that the methods of the application can utilize culture media conditions comprising 5% or less, for example 2%, human AB serum, and employ known culture media conditions and compositions, for example those described in Smith et al., “Ex vivo expansion of human T cells for adoptive immunotherapy using the novel Xeno-free CTS Immune Cell Serum Replacement” Clinical & Translational-Immunology (2015) 4, e31; doi:10.1038/cti.2014.31.

[0569] In some embodiments, T cells are isolated from peripheral blood lymphocytes by lysing the red blood cells and depleting the monocytes, for example, by centrifugation through a PERCOLL™ gradient or by counterflow centrifugal elutriation. A specific subpopulation of T cells, such as CD3+, CD4+, CD8+, CD45RA+, and/or CD45RO+ T cells, can be further isolated by positive or negative selection techniques. For example, in some embodiments, T cells are isolated by incubation with anti-CD3/anti-CD28 (e.g., 3×28)-conjugated beads, such as DYNABEADS® M-450 CD3/CD28 T, for a time period sufficient for positive selection of the desired T cells. In some embodiments, the time period is about 30 minutes. In some embodiments, the time period ranges from 30 minutes to 36 hours or longer and all integer values there between. In some embodiments, the time period is at least 1, 2, 3, 4, 5, or 6 hours. In some embodiments, the time period is 10 to 24 hours. In some embodiments, the incubation time period is 24 hours. Longer incubation times may be used to isolate T cells in any situation where there are few T cells as compared to other cell types, such in isolating tumor infiltrating lymphocytes (TIL) from tumor tissue or from immunocompromised individuals. Further, use of longer incubation times can increase the efficiency of capture of CD8+ T cells. Thus, by simply shortening or lengthening the time T cells are allowed to bind to the CD3/CD28 beads and/or by increasing or decreasing the ratio of beads to T cells (as described further herein), subpopulations of T cells can be preferentially selected for or against at culture initiation or at other time points during the process. Additionally, by increasing or decreasing the ratio of anti-CD3 and/or anti-CD28 antibodies on the beads or other surface, subpopulations of T cells can be preferentially selected for or against at culture initiation or at other desired time points. The skilled artisan would recognize that multiple rounds of selection could also be used in the context of this disclosure. In certain embodiments, it may be desirable to perform the selection procedure and use the “unselected” cells in the activation and expansion process. “Unselected” cells can also be subjected to further rounds of selection.

[0570] Enrichment of a T cell population by negative selection can be accomplished with a combination of antibodies directed to surface markers unique to the negatively selected cells. One method is cell sorting and/or selection via negative magnetic immunoadherence or flow cytometry that uses a cocktail of monoclonal antibodies directed to cell surface markers present on the cells negatively selected. For example, to enrich for CD4+ cells by negative selection, a monoclonal antibody cocktail typically includes antibodies to CD14, CD20, CD11b, CD16, HLA-DR, and CD8. In certain embodiments, it may be desirable to enrich for or positively select for regulatory T cells which typically express CD4+, CD25+, CD62Lhi, GITR+, and FoxP3+. In certain embodiments, it may be desirable to enrich for cells that are CD127low. Alternatively, in certain embodiments, T regulatory cells are depleted by anti-C25 conjugated beads or other similar method of selection.

[0571] The methods described herein can include, e.g., selection of a specific subpopulation of immune effector cells, e.g., T cells, that are a T regulatory cell-depleted population, CD25+ depleted cells, using, e.g., a negative selection technique, e.g., described herein. Preferably, the population of T regulatory depleted cells contains less than 30%, 25%, 20%, 15%, 10%, 5%, 4%, 3%, 2%, 1% of CD25+ cells.

[0572] In some embodiments, T regulatory cells, e.g., CD25+ T cells, are removed from the population using an anti-CD25 antibody, or fragment thereof, or a CD25-binding ligand, IL-2. In some embodiments, the anti-CD25 antibody, or fragment thereof, or CD25-binding ligand is conjugated to a substrate, e.g., a bead, or is otherwise coated on a substrate, e.g., a bead. In some embodiments, the anti-CD25 antibody, or fragment thereof, is conjugated to a substrate as described herein.

[0573] In some embodiments, the T regulatory cells, e.g., CD25+ T cells, are removed from the population using CD25 depletion reagent from Miltenyi™. In some embodiments, the ratio of cells to CD25 depletion reagent is le7 cells to 20 uL, or le7 cells tol5 uL, or le7 cells to 10 uL, or le7 cells to 5 uL, or le7 cells to 2.5 uL, or le7 cells to 1.25 uL. In some embodiments, e.g., for T regulatory cells, e.g., CD25+ depletion, greater than 500 million cells/ml is used. In some embodiments, a concentration of cells of 600, 700, 800, or 900 million cells/ml is used.

[0574] In some embodiments, the population of immune effector cells to be depleted includes about 6×10⁹ CD25+ T cells. In other embodiments, the population of immune effector cells to be depleted include about 1×10⁹ to 1×10¹⁰ CD25+ T cell, and any integer value in between. In some embodiments, the resulting population T regulatory depleted cells has 2×10⁹ T regulatory cells, e.g., CD25+ cells, or less (e.g., 1×10⁹, 5×10⁸, 1×10⁸, 5×10⁷, 1×10⁷, or less CD25+ cells).

[0575] In some embodiments, the T regulatory cells, e.g., CD25+ cells, are removed from the population using the CliniMAC system with a depletion tubing set, such as, e.g., tubing 162-01. In some embodiments, the CliniMAC system is run on a depletion setting such as, e.g., DEPLETION2.1.

[0576] Without wishing to be bound by a particular theory, decreasing the level of negative regulators of immune cells (e.g., decreasing the number of unwanted immune cells, e.g., T_{REG} cells), in a subject prior to apheresis or during manufacturing of a CAR-expressing cell product can reduce the risk of subject relapse. For example, methods of depleting T_{REG} cells are known in the art. Methods of decreasing T_{REG} cells include, but are not limited to, cyclophosphamide, anti-GITR antibody (an anti-GITR antibody described herein), CD25-depletion, and combinations thereof.

[0577] In some embodiments, the manufacturing methods comprise reducing the number of (e.g., depleting) T_{REG} cells prior to manufacturing of the CAR-expressing cell. For example, manufacturing methods comprise contacting the sample, e.g., the apheresis sample, with an anti-GITR antibody and/or an anti-CD25 antibody (or fragment thereof, or a CD25-binding ligand), e.g., to deplete T_{REG} cells prior to manufacturing of the CAR-expressing cell (e.g., T cell, NK cell) product.

[0578] In some embodiments, a subject is pre-treated with one or more therapies that reduce T_{REG} cells prior to collection of cells for CAR-expressing cell product manufacturing, thereby reducing the risk of subject relapse to CAR-expressing cell treatment. In some embodiments, methods of decreasing T_{REG} cells include, but are not limited to, administration to the subject of one or more of cyclophosphamide, anti-GITR antibody, CD25-depletion, or a combination thereof. Administration of one or more of cyclophosphamide, anti-GITR antibody, CD25-depletion, or a combination thereof, can occur before, during or after an infusion of the CAR-expressing cell product.

[0579] In some embodiments, a subject is pre-treated with cyclophosphamide prior to collection of cells for CAR IL-15R/IL-15-expressing cell product manufacturing, thereby reducing the risk of subject relapse to CAR IL-15R/IL-15-expressing cell treatment. In some embodiments, a subject is pre-treated with an anti-GITR antibody prior to collection of cells for CAR IL-15R/IL-15-expressing cell product manufacturing, thereby reducing the risk of subject relapse to CAR IL-15R/IL-15-expressing cell treatment.

[0580] In some embodiments, the population of cells to be removed are neither the regulatory T cells or tumor cells, but cells that otherwise negatively affect the expansion and/or function of CAR IL-15R/IL-15 T cells, e.g. cells expressing CD14, CD11b, CD33, CD15, or other markers expressed by potentially immune suppressive cells. In some embodiments, such cells are envisioned to be removed concurrently with regulatory T cells and/or tumor cells, or following said depletion, or in another order.

[0581] The methods described herein can include more than one selection step, e.g., more than one depletion step. Enrichment of a T cell population by negative selection can be accomplished, e.g., with a combination of antibodies directed to surface markers unique to the negatively selected cells. One method is cell sorting and/or selection via negative magnetic immunoadherence or flow cytometry that uses a cocktail of monoclonal antibodies directed to cell surface markers present on the cells negatively selected. For example, to enrich for CD4+ cells by negative selection, a monoclonal antibody cocktail can include antibodies to CD14, CD20, CD11b, CD16, HLA-DR, and CD8.

[0582] The methods described herein can further include removing cells from the population which express a tumor antigen, e.g., a tumor antigen that does not comprise CD25, e.g., CD19, CD30, CD38, CD123, CD20, CD14 or CD11b, to thereby provide a population of T regulatory depleted, e.g., CD25+ depleted, and tumor antigen depleted cells that are suitable for expression of a CAR molecule, e.g., a CAR molecule described herein. In some embodiments, tumor antigen expressing cells are removed simultaneously with the T regulatory, e.g., CD25+ cells. For example, an anti-CD25 antibody, or fragment thereof, and an anti-tumor antigen antibody, or fragment thereof, can be attached to the same substrate, e.g., bead, which can be used to remove the cells or an anti-CD25 antibody, or fragment thereof, or the anti-tumor antigen antibody, or fragment thereof, can be attached to separate beads, a mixture of which can be used to remove the cells. In other embodiments, the removal of T regulatory cells, e.g., CD25+ cells, and the removal of the tumor antigen expressing cells is sequential, and can occur, e.g., in either order.

[0583] Also provided are methods that include removing cells from the population which express a check point inhibitor, e.g., a check point inhibitor described herein, e.g., one or more of PD1+ cells, LAG3+ cells, and TIM3+ cells, to thereby provide a population of T regulatory depleted, e.g., CD25+ depleted cells, and check point inhibitor depleted cells, e.g., PD1+, LAG3+ and/or TIM3+ depleted cells. Exemplary check point inhibitors include PD1, PD-L1, PD-L2, CTLA4, TIM3, CEACAM (e.g., CEACAM-1, CEACAM-3 and/or CEACAM-5), LAG3, VISTA, BTLA, TIGIT, LAIR1, CD160, 2B4, CD80, CD86, B7-H3 (CD276), B7-H4 (VTCN1), HVEM (TNFRSF14 or CD270), KIR, A2aR, MHC class I, MHC class II, GAL9, adenosine, and TGF beta. In embodiments, the checkpoint inhibitor is PD1 or PD-L1. In some embodiments, check point inhibitor expressing cells are removed simultaneously with the T regulatory, e.g., CD25+ cells. For example, an anti-CD25 antibody, or fragment thereof, and an anti-check point inhibitor antibody, or fragment thereof, can be attached to the same bead which can be used to remove the cells, or an anti-CD25 antibody, or fragment thereof, and the anti-check point inhibitor antibody, or fragment there, can be attached to separate beads, a mixture of which can be used to remove the cells. In other embodiments, the removal of T regulatory cells, e.g., CD25+ cells, and the removal of the check point inhibitor expressing cells is sequential, and can occur, e.g., in either order.

[0584] In some embodiments, a T cell population can be selected that expresses one or more of IFN-γ, TNFα, IL-17A, IL-2, IL-3, IL-4, GM-CSF, IL-1β, IL-13, granzyme B, and perforin, or other appropriate molecules, e.g., other cytokines. Methods for screening for cell expression can be determined, e.g., by the methods described in PCT Publication No.: WO 2013/126712.

[0585] For isolation of a desired population of cells by positive or negative selection, the concentration of cells and surface (e.g., particles such as beads) can be varied. In certain embodiments, it may be desirable to significantly decrease the volume in which beads and cells are mixed together (e.g., increase the concentration of cells), to ensure maximum contact of cells and beads. For example, in some embodiments, a concentration of 2 billion cells/ml is used. In some embodiments, a concentration of 1 billion cells/ml is used. In some embodiments, greater than 100 million cells/ml is used. In some embodiments, a concentration of cells of 10, 15, 20, 25, 30, 35, 40, 45, or 50 million cells/ml is used. In yet some embodiments, a concentration of cells from 75, 80, 85, 90, 95, or 100 million cells/ml is used. In further embodiments, concentrations of 125 or 150 million cells/ml can be used. Using high concentrations can result in increased cell yield, cell activation, and cell expansion. Further, use of high cell concentrations allows more efficient capture of cells that may weakly express target antigens of interest, such as CD28-negative T cells, or from samples where there are many tumor cells present (e.g., leukemic blood, tumor tissue, etc.). Such populations of cells may have therapeutic value and would be desirable to obtain. For example, using high concentration of cells allows more efficient selection of CD8+ T cells that normally have weaker CD28 expression.

[0586] In some embodiments, it may be desirable to use lower concentrations of cells. By significantly diluting the mixture of T cells and surface (e.g., particles such as beads), interactions between the particles and cells is minimized. This selects for cells that express high amounts of desired antigens to be bound to the particles. For example, CD4+ T cells express higher levels of CD28 and are more efficiently captured than CD8+ T cells in dilute concentrations. In some embodiments, the concentration of cells used is 5×10e6/ml. In other embodiments, the concentration used can be from about 1×10⁵/ml to 1×10⁶/ml, and any integer value in between.

[0587] In other embodiments, the cells may be incubated on a rotator for varying lengths of time at varying speeds at either 2-10° C. or at room temperature.

[0588] T cells for stimulation can also be frozen after a washing step. Wishing not to be bound by theory, the freeze and subsequent thaw step provides a more uniform product by removing granulocytes and to some extent monocytes in the cell population. After the washing step that removes plasma and platelets, the cells may be suspended in a freezing solution. While many freezing solutions and parameters are known in the art and will be useful in this context, one method involves using PBS containing 20% DMSO and 8% human serum albumin, or culture media containing 10% Dextran 40 and 5% Dextrose, 20% Human Serum Albumin and 7.5% DMSO, or 31.25% Plasmalyte-A, 31.25% Dextrose 5%, 0.45% NaCl, 10% Dextran 40 and 5% Dextrose, 20% Human Serum Albumin, and 7.5% DMSO or other suitable cell freezing media containing for example, Hespan and PlasmaLyte A, the cells then are frozen to −80° C. at a rate of 1° per minute and stored in the vapor phase of a liquid nitrogen storage tank. Other methods of controlled freezing may be used as well as uncontrolled freezing immediately at −20° C. or in liquid nitrogen.

[0589] In certain embodiments, cryopreserved cells are thawed and washed as described herein and allowed to rest for one hour at room temperature prior to activation using the methods of the present disclosure.

[0590] Also contemplated in the context of the disclosure is the collection of blood samples or apheresis product from a subject at a time period prior to when the expanded cells as described herein might be needed. As such, the source of the cells to be expanded can be collected at any time point necessary, and desired cells, such as immune effector cells, e.g., T cells or NK cells, isolated and frozen for later use in cell therapy, e.g., T cell therapy, for any number of diseases or conditions that would benefit from cell therapy, e.g., T cell therapy, such as those described herein. In some embodiments, a blood sample or an apheresis is taken from a generally healthy subject. In certain embodiments, a blood sample or an apheresis is taken from a generally healthy subject who is at risk of developing a disease, but who has not yet developed a disease, and the cells of interest are isolated and frozen for later use. In certain embodiments, the immune effector cells (e.g., T cells or NK cells) may be expanded, frozen, and used at a later time. In certain embodiments, samples are collected from a patient shortly after diagnosis of a particular disease as described herein but prior to any treatments. In some embodiments, the cells are isolated from a blood sample or an apheresis from a subject prior to any number of relevant treatment modalities, including but not limited to treatment with agents such as natalizumab, efalizumab, antiviral agents, chemotherapy, radiation, immunosuppressive agents, such as cyclosporin, azathioprine, methotrexate, mycophenolate, and FK506, antibodies, or other immunoablative agents such as CAMPATH, anti-CD3 antibodies, cytoxan, fludarabine, cyclosporin, FK506, rapamycin, mycophenolic acid, steroids, FR901228, and irradiation.

[0591] In some embodiments of the present disclosure, T cells are obtained from a patient directly following treatment that leaves the subject with functional T cells. In this regard, it has been observed that following certain cancer treatments, in particular treatments with drugs that damage the immune system, shortly after treatment during the period when patients would normally be recovering from the treatment, the quality of T cells obtained may be optimal or improved for their ability to expand ex vivo. Likewise, following ex vivo manipulation using the methods described herein, these cells may be in a preferred state for enhanced engraftment and in vivo expansion. Thus, it is contemplated within the context of the present disclosure to collect blood cells, including T cells, dendritic cells, or other cells of the hematopoietic lineage, during this recovery phase. Further, in certain embodiments, mobilization (for example, mobilization with GM-CSF) and conditioning regimens can be used to create a condition in a subject wherein repopulation, recirculation, regeneration, and/or expansion of particular cell types is favored, especially during a defined window of time following therapy. Illustrative cell types include T cells, B cells, dendritic cells, and other cells of the immune system.

[0592] In some embodiments, the immune effector cells expressing a CAR molecule, e.g., a CAR molecule described herein, are obtained from a subject that has received a low, immune enhancing dose of an mTOR inhibitor. In some embodiments, the population of immune effector cells, e.g., T cells, to be engineered to express a CAR molecule, are harvested after a sufficient time, or after sufficient dosing of the low, immune enhancing, dose of an mTOR inhibitor, such that the level of PD1 negative immune effector cells, e.g., T cells, or the ratio of PD1 negative immune effector cells, e.g., T cells/PD1 positive immune effector cells, e.g., T cells, in the subject or harvested from the subject has been, at least transiently, increased.

[0593] In other embodiments, population of immune effector cells, e.g., T cells, which have, or will be engineered to express a CAR molecule, can be treated ex vivo by contact with an amount of an mTOR inhibitor that increases the number of PD1 negative immune effector cells, e.g., T cells or increases the ratio of PD1 negative immune effector cells, e.g., T cells/PD1 positive immune effector cells, e.g., T cells.

[0594] In some embodiments, a T cell population is diaglycerol kinase (DGK)-deficient. DGK-deficient cells include cells that do not express DGK RNA or protein, or have reduced or inhibited DGK activity. DGK-deficient cells can be generated by genetic approaches, e.g., administering RNA-interfering agents, e.g., siRNA, shRNA, miRNA, to reduce or prevent DGK expression. Alternatively, DGK-deficient cells can be generated by treatment with DGK inhibitors described herein.

[0595] In some embodiments, a T cell population is Ikaros-deficient. Ikaros-deficient cells include cells that do not express Ikaros RNA or protein, or have reduced or inhibited Ikaros activity, Ikaros-deficient cells can be generated by genetic approaches, e.g., administering RNA-interfering agents, e.g., siRNA, shRNA, miRNA, to reduce or prevent Ikaros expression. Alternatively, Ikaros-deficient cells can be generated by treatment with Ikaros inhibitors, e.g., lenalidomide.

[0596] In embodiments, a T cell population is DGK-deficient and Ikaros-deficient, e.g., does not express DGK and Ikaros, or has reduced or inhibited DGK and Ikaros activity. Such DGK and Ikaros-deficient cells can be generated by any of the methods described herein.

[0597] In some embodiments, the NK cells are obtained from the subject. In some embodiments, the NK cells are an NK cell line, e.g., NK-92 cell line (Conkwest).

### Modifications of CAR Cells, Including Allogeneic CAR Cells

[0598] In embodiments described herein, the immune effector cell can be an allogeneic immune effector cell, e.g., T cell or NK cell. For example, the cell can be an allogeneic T cell, e.g., an allogeneic T cell lacking expression of a functional T cell receptor (TCR) and/or human leukocyte antigen (HLA), e.g., HLA class I and/or HLA class II, and/or beta-2 microglobulin (β₂m). Compositions of allogeneic CAR and methods thereof have been described in, e.g., pages 227-237 of WO 2016/014565, incorporated herein by reference in its entirety.

[0599] In some embodiments, a cell, e.g., a T cell or a NK cell, is modified to reduce the expression of a TCR, and/or HLA, and/or β₂m, and/or an inhibitory molecule described herein (e.g., PD1, PD-L1, PD-L2, CTLA4, TIM3, CEACAM (e.g., CEACAM-1, CEACAM-3 and/or CEACAM-5), LAG3, VISTA, BTLA, TIGIT, LAIR1, CD160, 2B4, CD80, CD86, B7-H3 (CD276), B7-H4 (VTCN1), HVEM (TNFRSF14 or CD270), KIR, A2aR, MHC class I, MHC class II, GAL9, adenosine, and TGF beta), using, e.g., a method described herein, e.g., siRNA, shRNA, clustered regularly interspaced short palindromic repeats (CRISPR) transcription-activator like effector nuclease (TALEN), or zinc finger endonuclease (ZFN).

[0600] In some embodiments, a cell, e.g., a T cell or a NK cell is engineered to express a telomerase subunit, e.g., the catalytic subunit of telomerase, e.g., TERT, e.g., hTERT. In some embodiments, such modification improves persistence of the cell in a patient.

### Methods of CAR Manufacture/Production

[0601] The present disclosure also provides methods of making a cell disclosed herein, e.g., methods of engineering a T cell or NK cell to express a nucleic acid molecule encoding a CAR construct described herein, e.g., CD19 CAR construct. In some embodiments, provided herein is a population of cells (for example, immune effector cells, for example, T cells or NK cells) made by any of the manufacturing processes described herein.

### Activation Process

[0602] In some embodiments, the methods disclosed herein may manufacture immune effector cells engineered to express a CAR in less than 24 hours. Without wishing to be bound by theory, the methods provided herein preserve the undifferentiated phenotype of T cells, such as naïve T cells, during the manufacturing process. These CAR-expressing cells with an undifferentiated phenotype may persist longer and/or expand better in vivo after infusion. In some embodiments, CART cells produced by the manufacturing methods provided herein comprise a higher percentage of stem cell memory T cells, compared to CART cells produced by the traditional manufacturing process, e.g., as measured using scRNA-seq. In some embodiments, CART cells produced by the manufacturing methods provided herein comprise a higher percentage of effector T cells, compared to CART cells produced by the traditional manufacturing process, e.g., as measured using scRNA-seq. In some embodiments, CART cells produced by the manufacturing methods provided herein better preserve the stemness of T cells, compared to CART cells produced by the traditional manufacturing process, e.g., as measured using scRNA-seq. In some embodiments, CART cells produced by the manufacturing methods provided herein show a lower level of hypoxia, compared to CART cells produced by the traditional manufacturing process, e.g., as measured using scRNA-seq. In some embodiments, CART cells produced by the manufacturing methods provided herein show a lower level of autophagy, compared to CART cells produced by the traditional manufacturing process, e.g., as measured using scRNA-seq.

[0603] In some embodiments, the methods disclosed herein do not involve using a bead, such as Dynabeads® (for example, CD3/CD28 Dynabeads®), and do not involve a de-beading step. In some embodiments, the CART cells manufactured by the methods disclosed herein may be administered to a subject with minimal ex vivo expansion, for example, less than 1 day, less than 12 hours, less than 8 hours, less than 6 hours, less than 4 hours, less than 3 hours, less than 2 hours, less than 1 hour, or no ex vivo expansion. Accordingly, the methods described herein provide a fast manufacturing process of making improved CAR-expressing cell products for use in treating a disease in a subject.

[0604] In some embodiments, the present disclosure provides methods of making a population of cells (for example, T cells) that express a chimeric antigen receptor (CAR) comprising: (i) contacting a population of cells (for example, T cells, for example, T cells isolated from a frozen or fresh leukapheresis product) with an agent that stimulates a CD3/TCR complex and/or an agent that stimulates a costimulatory molecule on the surface of the cells; (ii) contacting the population of cells (for example, T cells) with a nucleic acid molecule(s) (for example, a DNA or RNA molecule) encoding the CAR, thereby providing a population of cells (for example, T cells) comprising the nucleic acid molecule, and (iii) harvesting the population of cells (for example, T cells) for storage (for example, reformulating the population of cells in cryopreservation media) or administration, wherein: (a) step (ii) is performed together with step (i) or no later than 20 hours after the beginning of step (i), for example, no later than 12, 13, 14, 15, 16, 17, or 18 hours after the beginning of step (i), for example, no later than 18 hours after the beginning of step (i), and step (iii) is performed no later than 26 hours after the beginning of step (i), for example, no later than 22, 23, or 24 hours after the beginning of step (i), for example, no later than 24 hours after the beginning of step (i); (b) step (ii) is performed together with step (i) or no later than 20 hours after the beginning of step (i), for example, no later than 12, 13, 14, 15, 16, 17, or 18 hours after the beginning of step (i), for example, no later than 18 hours after the beginning of step (i), and step (iii) is performed no later than 30 hours after the beginning of step (ii), for example, no later than 22, 23, 24, 25, 26, 27, 28, 29, or 30 hours after the beginning of step (ii); or (c) the population of cells from step (iii) are not expanded, or expanded by no more than 5, 10, 15, 20, 25, 30, 35, or 40%, for example, no more than 10%, for example, as assessed by the number of living cells, compared to the population of cells at the beginning of step (i). In some embodiments, the nucleic acid molecule in step (ii) is a DNA molecule. In some embodiments, the nucleic acid molecule in step (ii) is an RNA molecule. In some embodiments, the nucleic acid molecule in step (ii) is on a viral vector, for example, a viral vector chosen from a lentivirus vector, an adenoviral vector, or a retrovirus vector. In some embodiments, the nucleic acid molecule in step (ii) is on a non-viral vector. In some embodiments, the nucleic acid molecule in step (ii) is on a plasmid. In some embodiments, the nucleic acid molecule in step (ii) is not on any vector. In some embodiments, step (ii) comprises transducing the population of cells (for example, T cells) a viral vector(s) comprising a nucleic acid molecule encoding the CAR.

[0605] In some embodiments, the population of cells (for example, T cells) is collected from an apheresis sample (for example, a leukapheresis sample) from a subject.

[0606] In some embodiments, the apheresis sample (for example, a leukapheresis sample) is collected from the subject and shipped as a frozen sample (for example, a cryopreserved sample) to a cell manufacturing facility. Then the frozen apheresis sample is thawed, and T cells (for example, CD4+ T cells and/or CD8+ T cells) are selected from the apheresis sample, for example, using a cell-sorting machine (for example, a CliniMACS® Prodigy® device). The selected T cells (for example, CD4+ T cells and/or CD8+ T cells) are then seeded for CART manufacturing using the activation process described herein. In some embodiments, the selected T cells (for example, CD4+ T cells and/or CD8+ T cells) undergo one or more rounds of freeze-thaw before being seeded for CART manufacturing.

[0607] In some embodiments, the apheresis sample (for example, a leukapheresis sample) is collected from the subject and shipped as a fresh product (for example, a product that is not frozen) to a cell manufacturing facility. T cells (for example, CD4+ T cells and/or CD8+ T cells) are selected from the apheresis sample, for example, using a cell sorting machine (for example, a CliniMACS® Prodigy® device). The selected T cells (for example, CD4+ T cells and/or CD8+ T cells) are then seeded for CART manufacturing using the activation process described herein. In some embodiments, the selected T cells (for example, CD4+ T cells and/or CD8+ T cells) undergo one or more rounds of freeze-thaw before being seeded for CART manufacturing.

[0608] In some embodiments, the apheresis sample (for example, a leukapheresis sample) is collected from the subject. T cells (for example, CD4+ T cells and/or CD8+ T cells) are selected from the apheresis sample, for example, using a cell sorting machine (for example, a CliniMACS® Prodigy® device). The selected T cells (for example, CD4+ T cells and/or CD8+ T cells) are then shipped as a frozen sample (for example, a cryopreserved sample) to a cell manufacturing facility. The selected T cells (for example, CD4+ T cells and/or CD8+ T cells) are later thawed and seeded for CART manufacturing using the activation process described herein.

[0609] In some embodiments, cells (for example, T cells) are contacted with anti-CD3 and anti-CD28 antibodies for, for example, 12 hours, followed by transduction with a vector (for example, a lentiviral vector) (e.g. one or more vectors) encoding a CAR. 24 hours after culture initiation, the cells are washed and formulated for storage or administration.

[0610] Without wishing to be bound by theory, brief CD3 and CD28 stimulation may promote efficient transduction of self-renewing T cells. Compared to traditional CART manufacturing approaches, the activation process provided herein does not involve prolonged ex vivo expansion. Similar to the cytokine process, the activation process provided herein also preserves undifferentiated T cells during CART manufacturing.

[0611] In some embodiments, the population of cells is contacted with an agent that stimulates a CD3/TCR complex and/or an agent that stimulates a costimulatory molecule on the surface of the cells.

[0612] In some embodiments, the agent that stimulates a CD3/TCR complex is an agent that stimulates CD3. In some embodiments, the agent that stimulates a costimulatory molecule is an agent that stimulates CD28, ICOS, CD27, HVEM, LIGHT, CD40, 4-1BB, OX40, DR3, GITR, CD30, TIM1, CD2, CD226, or any combination thereof. In some embodiments, the agent that stimulates a costimulatory molecule is an agent that stimulates CD28. In some embodiments, the agent that stimulates a CD3/TCR complex is chosen from an antibody (for example, a single-domain antibody (for example, a heavy chain variable domain antibody), a peptibody, a Fab fragment, or a scFv), a small molecule, or a ligand (for example, a naturally existing, recombinant, or chimeric ligand). In some embodiments, the agent that stimulates a CD3/TCR complex is an antibody. In some embodiments, the agent that stimulates a CD3/TCR complex is an anti-CD3 antibody. In some embodiments, the agent that stimulates a costimulatory molecule is chosen from an antibody (for example, a single-domain antibody (for example, a heavy chain variable domain antibody), a peptibody, a Fab fragment, or a scFv), a small molecule, or a ligand (for example, a naturally existing, recombinant, or chimeric ligand). In some embodiments, the agent that stimulates a costimulatory molecule is an antibody. In some embodiments, the agent that stimulates a costimulatory molecule is an anti-CD28 antibody. In some embodiments, the agent that stimulates a CD3/TCR complex or the agent that stimulates a costimulatory molecule does not comprise a bead. In some embodiments, the agent that stimulates a CD3/TCR complex comprises an anti-CD3 antibody covalently attached to a colloidal polymeric nanomatrix. In some embodiments, the agent that stimulates a costimulatory molecule comprises an anti-CD28 antibody covalently attached to a colloidal polymeric nanomatrix. In some embodiments, the agent that stimulates a CD3/TCR complex and the agent that stimulates a costimulatory molecule comprise T Cell TransAct™.

[0613] In some embodiments, the matrix comprises or consists of a polymeric, for example, biodegradable or biocompatible inert material, for example, which is non-toxic to cells. In some embodiments, the matrix is composed of hydrophilic polymer chains, which obtain maximal mobility in aqueous solution due to hydration of the chains. In some embodiments, the mobile matrix may be of collagen, purified proteins, purified peptides, polysaccharides, glycosaminoglycans, or extracellular matrix compositions. A polysaccharide may include for example, cellulose ethers, starch, gum arabic, agarose, dextran, chitosan, hyaluronic acid, pectins, xanthan, guar gum or alginate. Other polymers may include polyesters, polyethers, polyacrylates, polyacrylamides, polyamines, polyethylene imines, polyquaternium polymers, polyphosphazenes, polyvinylalcohols, polyvinylacetates, polyvinylpyrrolidones, block copolymers, or polyurethanes. In some embodiments, the mobile matrix is a polymer of dextran.

[0614] In some embodiments, the population of cells is contacted with a nucleic acid molecule encoding a CAR. In some embodiments, the population of cells is transduced with a DNA molecule encoding a CAR.

[0615] In some embodiments, contacting the population of cells with the nucleic acid molecule(s) encoding the CAR occurs simultaneously with contacting the population of cells with the agent that stimulates a CD3/TCR complex and/or the agent that stimulates a costimulatory molecule on the surface of the cells described above. In some embodiments, contacting the population of cells with the nucleic acid molecule(s) encoding the CAR occurs no later than 30, 29, 28, 27, 26, 25, 24, 23, 22, 21, 20, 19, 18, 17, 16, 15, 14, 13, 12, 11, 10, 9, 8, 7, 6, 5, 4, 3, 2, 1, or 0.5 hours after the beginning of contacting the population of cells with the agent that stimulates a CD3/TCR complex and/or the agent that stimulates a costimulatory molecule on the surface of the cells described above. In some embodiments, contacting the population of cells with the nucleic acid molecule(s) encoding the CAR occurs no later than 20 hours after the beginning of contacting the population of cells with the agent that stimulates a CD3/TCR complex and/or the agent that stimulates a costimulatory molecule on the surface of the cells described above. In some embodiments, contacting the population of cells with the nucleic acid molecule(s) encoding the CAR occurs no later than 19 hours after the beginning of contacting the population of cells with the agent that stimulates a CD3/TCR complex and/or the agent that stimulates a costimulatory molecule on the surface of the cells described above. In some embodiments, contacting the population of cells with the nucleic acid molecule(s) encoding the CAR occurs no later than 18 hours after the beginning of contacting the population of cells with the agent that stimulates a CD3/TCR complex and/or the agent that stimulates a costimulatory molecule on the surface of the cells described above. In some embodiments, contacting the population of cells with the nucleic acid molecule(s) encoding the CAR occurs no later than 17 hours after the beginning of contacting the population of cells with the agent that stimulates a CD3/TCR complex and/or the agent that stimulates a costimulatory molecule on the surface of the cells described above. In some embodiments, contacting the population of cells with the nucleic acid molecule(s) encoding the CAR occurs no later than 16 hours after the beginning of contacting the population of cells with the agent that stimulates a CD3/TCR complex and/or the agent that stimulates a costimulatory molecule on the surface of the cells described above. In some embodiments, contacting the population of cells with the nucleic acid molecule(s) encoding the CAR occurs no later than 15 hours after the beginning of contacting the population of cells with the agent that stimulates a CD3/TCR complex and/or the agent that stimulates a costimulatory molecule on the surface of the cells described above. In some embodiments, contacting the population of cells with the nucleic acid molecule(s) encoding the CAR occurs no later than 14 hours after the beginning of contacting the population of cells with the agent that stimulates a CD3/TCR complex and/or the agent that stimulates a costimulatory molecule on the surface of the cells described above. In some embodiments, contacting the population of cells with the nucleic acid molecule(s) encoding the CAR occurs no later than 14 hours after the beginning of contacting the population of cells with the agent that stimulates a CD3/TCR complex and/or the agent that stimulates a costimulatory molecule on the surface of the cells described above. In some embodiments, contacting the population of cells with the nucleic acid molecule(s) encoding the CAR occurs no later than 13 hours after the beginning of contacting the population of cells with the agent that stimulates a CD3/TCR complex and/or the agent that stimulates a costimulatory molecule on the surface of the cells described above. In some embodiments, contacting the population of cells with the nucleic acid molecule(s) encoding the CAR occurs no later than 12 hours after the beginning of contacting the population of cells with the agent that stimulates a CD3/TCR complex and/or the agent that stimulates a costimulatory molecule on the surface of the cells described above. In some embodiments, contacting the population of cells with the nucleic acid molecule(s) encoding the CAR occurs no later than 11 hours after the beginning of contacting the population of cells with the agent that stimulates a CD3/TCR complex and/or the agent that stimulates a costimulatory molecule on the surface of the cells described above. In some embodiments, contacting the population of cells with the nucleic acid molecule(s) encoding the CAR occurs no later than 10 hours after the beginning of contacting the population of cells with the agent that stimulates a CD3/TCR complex and/or the agent that stimulates a costimulatory molecule on the surface of the cells described above. In some embodiments, contacting the population of cells with the nucleic acid molecule(s) encoding the CAR occurs no later than 9 hours after the beginning of contacting the population of cells with the agent that stimulates a CD3/TCR complex and/or the agent that stimulates a costimulatory molecule on the surface of the cells described above. In some embodiments, contacting the population of cells with the nucleic acid molecule(s) encoding the CAR occurs no later than 8 hours after the beginning of contacting the population of cells with the agent that stimulates a CD3/TCR complex and/or the agent that stimulates a costimulatory molecule on the surface of the cells described above. In some embodiments, contacting the population of cells with the nucleic acid molecule(s) encoding the CAR occurs no later than 7 hours after the beginning of contacting the population of cells with the agent that stimulates a CD3/TCR complex and/or the agent that stimulates a costimulatory molecule on the surface of the cells described above. In some embodiments, contacting the population of cells with the nucleic acid molecule(s) encoding the CAR occurs no later than 6 hours after the beginning of contacting the population of cells with the agent that stimulates a CD3/TCR complex and/or the agent that stimulates a costimulatory molecule on the surface of the cells described above. In some embodiments, contacting the population of cells with the nucleic acid molecule(s) encoding the CAR occurs no later than 5 hours after the beginning of contacting the population of cells with the agent that stimulates a CD3/TCR complex and/or the agent that stimulates a costimulatory molecule on the surface of the cells described above. In some embodiments, contacting the population of cells with the nucleic acid molecule(s) encoding the CAR occurs no later than 4 hours after the beginning of contacting the population of cells with the agent that stimulates a CD3/TCR complex and/or the agent that stimulates a costimulatory molecule on the surface of the cells described above. In some embodiments, contacting the population of cells with the nucleic acid molecule(s) encoding the CAR occurs no later than 3 hours after the beginning of contacting the population of cells with the agent that stimulates a CD3/TCR complex and/or the agent that stimulates a costimulatory molecule on the surface of the cells described above. In some embodiments, contacting the population of cells with the nucleic acid molecule encoding the CAR occurs no later than 2 hours after the beginning of contacting the population of cells with the agent that stimulates a CD3/TCR complex and/or the agent that stimulates a costimulatory molecule on the surface of the cells described above. In some embodiments, contacting the population of cells with the nucleic acid molecule(s) encoding the CAR occurs no later than 1 hour after the beginning of contacting the population of cells with the agent that stimulates a CD3/TCR complex and/or the agent that stimulates a costimulatory molecule on the surface of the cells described above. In some embodiments, contacting the population of cells with the nucleic acid molecule(s) encoding the CAR occurs no later than 30 minutes after the beginning of contacting the population of cells with the agent that stimulates a CD3/TCR complex and/or the agent that stimulates a costimulatory molecule on the surface of the cells described above.

[0616] In some embodiments, the population of cells is harvested for storage or administration.

[0617] In some embodiments, the population of cells is harvested for storage or administration no later than 72, 60, 48, 36, 32, 31, 30, 29, 28, 27, 26, 25, 24, 23, 22, 21, 20, 19, or 18 hours after the beginning of contacting the population of cells with the agent that stimulates a CD3/TCR complex and/or the agent that stimulates a costimulatory molecule on the surface of the cells described above. In some embodiments, the population of cells is harvested for storage or administration no later than 26 hours after the beginning of contacting the population of cells with the agent that stimulates a CD3/TCR complex and/or the agent that stimulates a costimulatory molecule on the surface of the cells described above. In some embodiments, the population of cells is harvested for storage or administration no later than 25 hours after the beginning of contacting the population of cells with the agent that stimulates a CD3/TCR complex and/or the agent that stimulates a costimulatory molecule on the surface of the cells described above. In some embodiments, the population of cells is harvested for storage or administration no later than 24 hours after the beginning of contacting the population of cells with the agent that stimulates a CD3/TCR complex and/or the agent that stimulates a costimulatory molecule on the surface of the cells described above. In some embodiments, the population of cells is harvested for storage or administration no later than 23 hours after the beginning of contacting the population of cells with the agent that stimulates a CD3/TCR complex and/or the agent that stimulates a costimulatory molecule on the surface of the cells described above. In some embodiments, the population of cells is harvested for storage or administration no later than 22 hours after the beginning of contacting the population of cells with the agent that stimulates a CD3/TCR complex and/or the agent that stimulates a costimulatory molecule on the surface of the cells described above.

[0618] In some embodiments, the population of cells is not expanded ex vivo.

[0619] In some embodiments, the population of cells is expanded by no more than 5, 6, 7, 8, 9, 10, 11, 12, 13, 14, 15, 16, 17, 18, 19, 20, 25, 30, 35, 40, 45, 50, 55, or 60%, for example, as assessed by the number of living cells, compared to the population of cells before it is contacted with the agent that stimulates a CD3/TCR complex and/or the agent that stimulates a costimulatory molecule on the surface of the cells described above. In some embodiments, the population of cells is expanded by no more than 5%, for example, as assessed by the number of living cells, compared to the population of cells before it is contacted with the agent that stimulates a CD3/TCR complex and/or the agent that stimulates a costimulatory molecule on the surface of the cells described above. In some embodiments, the population of cells is expanded by no more than 10%, for example, as assessed by the number of living cells, compared to the population of cells before it is contacted with the agent that stimulates a CD3/TCR complex and/or the agent that stimulates a costimulatory molecule on the surface of the cells described above. In some embodiments, the population of cells is expanded by no more than 15%, for example, as assessed by the number of living cells, compared to the population of cells before it is contacted with the agent that stimulates a CD3/TCR complex and/or the agent that stimulates a costimulatory molecule on the surface of the cells described above. In some embodiments, the population of cells is expanded by no more than 20%, for example, as assessed by the number of living cells, compared to the population of cells before it is contacted with the agent that stimulates a CD3/TCR complex and/or the agent that stimulates a costimulatory molecule on the surface of the cells described above. In some embodiments, the population of cells is expanded by no more than 25%, for example, as assessed by the number of living cells, compared to the population of cells before it is contacted with the agent that stimulates a CD3/TCR complex and/or the agent that stimulates a costimulatory molecule on the surface of the cells described above. In some embodiments, the population of cells is expanded by no more than 30%, for example, as assessed by the number of living cells, compared to the population of cells before it is contacted with the agent that stimulates a CD3/TCR complex and/or the agent that stimulates a costimulatory molecule on the surface of the cells described above. In some embodiments, the population of cells is expanded by no more than 35%, for example, as assessed by the number of living cells, compared to the population of cells before it is contacted with the agent that stimulates a CD3/TCR complex and/or the agent that stimulates a costimulatory molecule on the surface of the cells described above. In some embodiments, the population of cells is expanded by no more than 40%, for example, as assessed by the number of living cells, compared to the population of cells before it is contacted with the agent that stimulates a CD3/TCR complex and/or the agent that stimulates a costimulatory molecule on the surface of the cells described above.

[0620] In some embodiments, the population of cells is expanded by no more than 1, 1.5, 2, 2.5, 3, 3.5, 4, 4.5, 5, 6, 7, 8, 9, 10, 11, 12, 16, 20, 24, 36, or 48 hours, for example, as assessed by the number of living cells, compared to the population of cells before it is contacted with the one or more cytokines described above.

[0621] In some embodiments, the activation process is conducted in serum free cell media. In some embodiments, the activation process is conducted in cell media comprising one or more cytokines chosen from: IL-2, IL-15 (for example, hetIL-15 (IL15/sIL-15Ra)), or IL-6 (for example, IL-6/sIL-6Ra). In some embodiments, hetIL-15 comprises the amino acid sequence of NWVNVISDLKKIEDLIQSMHIDATLYTESDVHPSCKVTAMKCFLLELQVISLESGDASIHDTV ENLIILANNSLSSNGNVTESGCKECEELEEKNIKEFLQSFVHIVQMFINTSITCPPPMSVEHADI WVKSYSLYSRERYICNSGFKRKAGTSSLTECVLNKATNVAHWTTPSLKCIRDPALVHQRPAP PSTVTTAGVTPQPESLSPSGKEPAASSPSSNNTAATTAAIVPGSQLMPSKSPSTGTTEISSHESS HGTPSQTTAKNWELTASASHQPPGVYPQG (SEQ ID NO: 3003). In some embodiments, hetIL-15 comprises an amino acid sequence having at least about 70, 75, 80, 85, 90, 95, or 99% identity to SEQ ID NO: 3003. In some embodiments, the activation process is conducted in cell media comprising a LSD1 inhibitor. In some embodiments, the activation process is conducted in cell media comprising a MALT1 inhibitor. In some embodiments, the serum free cell media comprises a serum replacement. In some embodiments, the serum replacement is CTS™ Immune Cell Serum Replacement (ICSR). In some embodiments, the level of ICSR can be, for example, up to 5%, for example, about 1%, 2%, 3%, 4%, or 5%.

[0622] In some embodiments, the present disclosure provides methods of making a population of cells (for example, T cells) that express a chimeric antigen receptor (CAR) comprising: (a) providing an apheresis sample (for example, a fresh or cryopreserved leukapheresis sample) collected from a subject; (b) selecting T cells from the apheresis sample (for example, using negative selection, positive selection, or selection without beads); (c) seeding isolated T cells at, for example, 1×10⁶ to 1×10⁷ cells/mL; (d) contacting T cells with an agent that stimulates T cells, for example, an agent that stimulates a CD3/TCR complex and/or an agent that stimulates a costimulatory molecule on the surface of the cells (for example, contacting T cells with anti-CD3 and/or anti-CD28 antibody, for example, contacting T cells with TransAct); (e) contacting T cells with a nucleic acid molecule(s) (for example, a DNA or RNA molecule) encoding the CAR (for example, contacting T cells with a virus comprising a nucleic acid molecule(s) encoding the CAR) for, for example, 6-48 hours, for example, 20-28 hours; and (f) washing and harvesting T cells for storage (for example, reformulating T cells in cryopreservation media) or administration. In some embodiments, step (f) is performed no later than 30 hours after the beginning of step (d) or (e), for example, no later than 22, 23, 24, 25, 26, 27, 28, 29, or 30 hours after the beginning of step (d) or (e).

[0623] In some embodiments, provided herein is a population of cells (for example, immune effector cells, for example, T cells or NK cells) made by any of the manufacturing processes described herein (e.g., the Activation Process described herein).

[0624] In some embodiments, the percentage of naïve cells, for example, naïve T cells, for example, CD45RA+CD45RO− CCR7+ T cells, in the population of cells at the end of the manufacturing process (for example, at the end of the cytokine process or the activation process described herein) (1) is the same as, (2) differs, for example, by no more than 4, 5, 6, 7, 8, 9, 10, 11, 12, 13, 14, or 15%, from, or (3) is increased, for example, by at least 5, 6, 7, 8, 9, 10, 11, 12, 13, 14, 15, 16, 17, 18, 19, 20, 21, 22, 23, 24, or 25%, as compared to, the percentage of naïve cells, for example, naïve T cells, for example, CD45RA+CD45RO− CCR7+ cells, in the population of cells at the beginning of the manufacturing process (for example, at the beginning of the cytokine process or the activation process described herein). In some embodiments, the population of cells at the end of the manufacturing process (for example, at the end of the cytokine process or the activation process described herein) shows a higher percentage of naïve cells, for example, naïve T cells, for example, CD45RA+CD45RO− CCR7+ T cells (for example, at least 5, 6, 7, 8, 9, 10, 11, 12, 13, 14, 15, 16, 17, 18, 19, 20, 25, 30, 35, 40, 45, or 50% higher), compared with cells made by an otherwise similar method which lasts, for example, more than 26 hours (for example, which lasts more than 5, 6, 7, 8, 9, 10, 11, or 12 days) or which involves expanding the population of cells in vitro for, for example, more than 3 days (for example, expanding the population of cells in vitro for 3, 4, 5, 6, 7, 8, 9, 10, 11, 12, 13, 14, or 15 days).

[0625] In some embodiments, the percentage of naïve cells, for example, naïve T cells, for example, CD45RA+CD45RO− CCR7+ T cells, in the population of cells at the end of the manufacturing process (for example, at the end of the cytokine process or the activation process described herein) is not less than 20, 25, 30, 35, 40, 45, 50, 55, or 60%.

[0626] In some embodiments, the percentage of central memory cells, for example, central memory T cells, for example, CD95+ central memory T cells, in the population of cells at the end of the manufacturing process (for example, at the end of the cytokine process or the activation process described herein) (1) is the same as, (2) differs, for example, by no more than 4, 5, 6, 7, 8, 9, 10, 11, 12, 13, 14, or 15% from, or (3) is decreased, for example, by at least 5, 6, 7, 8, 9, 10, 11, 12, 13, 14, 15, 16, 17, 18, 19, 20, 21, 22, 23, 24, or 25%, as compared to, the percentage of central memory cells, for example, central memory T cells, for example, CD95+ central memory T cells, in the population of cells at the beginning of the manufacturing process (for example, at the beginning of the cytokine process or the activation process described herein). In some embodiments, the population of cells at the end of the manufacturing process (for example, at the end of the cytokine process or the activation process described herein) shows a lower percentage of central memory cells, for example, central memory T cells, for example, CD95+ central memory T cells (for example, at least 5, 6, 7, 8, 9, 10, 11, 12, 13, 14, 15, 16, 17, 18, 19, 20, 25, 30, 35, 40, 45, or 50% lower), compared with cells made by an otherwise similar method which lasts, for example, more than 26 hours (for example, which lasts more than 5, 6, 7, 8, 9, 10, 11, or 12 days) or which involves expanding the population of cells in vitro for, for example, more than 3 days (for example, expanding the population of cells in vitro for 3, 4, 5, 6, 7, 8, 9, 10, 11, 12, 13, 14, or 15 days).

[0627] In some embodiments, the percentage of central memory cells, for example, central memory T cells, for example, CD95+ central memory T cells, in the population of cells at the end of the manufacturing process (for example, at the end of the cytokine process or the activation process described herein) is no more than 40, 45, 50, 55, 60, 65, 70, 75, or 80%.

[0628] In some embodiments, the population of cells at the end of the manufacturing process (for example, at the end of the cytokine process or the activation process described herein) after being administered in vivo, persists longer or expands at a higher level (for example, at least 20, 25, 30, 35, 40, 45, 50, 55, 60, 65, 70, 75, 80, 85, or 90% higher), compared with cells made by an otherwise similar method which lasts, for example, more than 26 hours (for example, which lasts more than 5, 6, 7, 8, 9, 10, 11, or 12 days) or which involves expanding the population of cells in vitro for, for example, more than 3 days (for example, expanding the population of cells in vitro for 3, 4, 5, 6, 7, 8, 9, 10, 11, 12, 13, 14, or 15 days).

[0629] In some embodiments, the population of cells has been enriched for IL6R-expressing cells (for example, cells that are positive for IL6Rx and/or IL6Rβ) prior to the beginning of the manufacturing process (for example, prior to the beginning of the cytokine process or the activation process described herein). In some embodiments, the population of cells comprises, for example, no less than 30, 35, 40, 45, 50, 55, 60, 65, 70, 75, or 80% of IL6R-expressing cells (for example, cells that are positive for IL6Rα and/or IL6Rβ) at the beginning of the manufacturing process (for example, at the beginning of the cytokine process or the activation process described herein).

### Cytokine Process

[0630] In some embodiments, the present disclosure provides methods of making a population of cells (for example, T cells) that express a chimeric antigen receptor (CAR) comprising: (1) contacting a population of cells with a cytokine chosen from IL-2, IL-7, IL-15, IL-21, IL-6, or a combination thereof, (2) contacting the population of cells (for example, T cells) with a nucleic acid molecule(s) (for example, a DNA or RNA molecule) encoding the CAR, thereby providing a population of cells (for example, T cells) comprising the nucleic acid molecule, and (3) harvesting the population of cells (for example, T cells) for storage (for example, reformulating the population of cells in cryopreservation media) or administration, wherein: (a) step (2) is performed together with step (1) or no later than 5 hours after the beginning of step (1), for example, no later than 1, 2, 3, 4, or 5 hours after the beginning of step (1), and step (3) is performed no later than 26 hours after the beginning of step (1), for example, no later than 22, 23, or 24 hours after the beginning of step (1), for example, no later than 24 hours after the beginning of step (1), or (b) the population of cells from step (3) are not expanded, or expanded by no more than 5, 10, 15, 20, 25, 30, 35, or 40%, for example, no more than 10%, for example, as assessed by the number of living cells, compared to the population of cells at the beginning of step (1). In some embodiments, the nucleic acid molecule in step (2) is a DNA molecule. In some embodiments, the nucleic acid molecule in step (2) is an RNA molecule. In some embodiments, the nucleic acid molecule in step (2) is on a viral vector, for example, a viral vector chosen from a lentivirus vector, an adenoviral vector, or a retrovirus vector. In some embodiments, the nucleic acid molecule in step (2) is on a non-viral vector. In some embodiments, the nucleic acid molecule in step (2) is on a plasmid. In some embodiments, the nucleic acid molecule in step (2) is not on any vector. In some embodiments, step (2) comprises transducing the population of cells (for example, T cells) with a viral vector comprising a nucleic acid molecule(s) encoding the CAR.

[0631] In some embodiments, the population of cells (for example, T cells) is collected from an apheresis sample (for example, a leukapheresis sample) from a subject.

[0632] In some embodiments, the apheresis sample (for example, a leukapheresis sample) is collected from the subject and shipped as a frozen sample (for example, a cryopreserved sample) to a cell manufacturing facility. The frozen apheresis sample is then thawed, and T cells (for example, CD4+ T cells and/or CD8+ T cells) are selected from the apheresis sample, for example, using a cell-sorting machine (for example, a CliniMACS® Prodigy® device). The selected T cells (for example, CD4+ T cells and/or CD8+ T cells) are then seeded for CART manufacturing using the cytokine process described herein. In some embodiments, at the end of the cytokine process, the CAR T cells are cryopreserved and later thawed and administered to the subject. In some embodiments, the selected T cells (for example, CD4+ T cells and/or CD8+ T cells) undergo one or more rounds of freeze-thaw before being seeded for CART manufacturing.

[0633] In some embodiments, the apheresis sample (for example, a leukapheresis sample) is collected from the subject and shipped as a fresh product (for example, a product that is not frozen) to a cell manufacturing facility. T cells (for example, CD4+ T cells and/or CD8+ T cells) are selected from the apheresis sample, for example, using a cell-sorting machine (for example, a CliniMACS® Prodigy® device). The selected T cells (for example, CD4+ T cells and/or CD8+ T cells) are then seeded for CART manufacturing using the cytokine process described herein. In some embodiments, the selected T cells (for example, CD4+ T cells and/or CD8+ T cells) undergo one or more rounds of freeze-thaw before being seeded for CART manufacturing.

[0634] In some embodiments, the apheresis sample (for example, a leukapheresis sample) is collected from the subject. T cells (for example, CD4+ T cells and/or CD8+ T cells) are selected from the apheresis sample, for example, using a cell sorting machine (for example, a CliniMACS® Prodigy® device). The selected T cells (for example, CD4+ T cells and/or CD8+ T cells) are then shipped as a frozen sample (for example, a cryopreserved sample) to a cell manufacturing facility. The selected T cells (for example, CD4+ T cells and/or CD8+ T cells) are later thawed and seeded for CART manufacturing using the cytokine process described herein.

[0635] In some embodiments, after cells (for example, T cells) are seeded, one or more cytokines (for example, one or more cytokines chosen from IL-2, IL-7, IL-15 (for example, hetIL-15 (IL15/sIL-15Ra)), IL-21, or IL-6 (for example, IL-6/sIL-6R)) as well as a vector (for example, a lentiviral vector) (e.g. one or more vectors) encoding a CAR are added to the cells. After incubation for 20-24 hours, the cells are washed and formulated for storage or administration.

[0636] Different from traditional CART manufacturing approaches, the cytokine process provided herein does not involve CD3 and/or CD28 stimulation, or ex vivo T cell expansion. T cells that are contacted with anti-CD3 and anti-CD28 antibodies and expanded extensively ex vivo tend to show differentiation towards a central memory phenotype. Without wishing to be bound by theory, the cytokine process provided herein preserves or increases the undifferentiated phenotype of T cells during CART manufacturing, generating a CART product that may persist longer after being infused into a subject.

[0637] In some embodiments, the population of cells is contacted with one or more cytokines (for example, one or more cytokines chosen from IL-2, IL-7, IL-15 (for example, hetIL-15 (IL15/sIL-15Ra)), IL-21, or IL-6 (for example, IL-6/sIL-6Ra).

[0638] In some embodiments, the population of cells is contacted with IL-2. In some embodiments, the population of cells is contacted with IL-7. In some embodiments, the population of cells is contacted with IL-15 (for example, hetIL-15 (IL15/sIL-15Ra)). In some embodiments, the population of cells is contacted with IL-21. In some embodiments, the population of cells is contacted with IL-6 (for example, IL-6/sIL-6Ra). In some embodiments, the population of cells is contacted with IL-2 and IL-7. In some embodiments, the population of cells is contacted with IL-2 and IL-15 (for example, hetIL-15 (IL15/sIL-15Ra)). In some embodiments, the population of cells is contacted with IL-2 and IL-21. In some embodiments, the population of cells is contacted with IL-2 and IL-6 (for example, IL-6/sIL-6Ra). In some embodiments, the population of cells is contacted with IL-7 and IL-15 (for example, hetIL-15 (IL15/sIL-15Ra)). In some embodiments, the population of cells is contacted with IL-7 and IL-21. In some embodiments, the population of cells is contacted with IL-7 and IL-6 (for example, IL-6/sIL-6Ra). In some embodiments, the population of cells is contacted with IL-15 (for example, hetIL-15 (IL15/sIL-15Ra)) and IL-21. In some embodiments, the population of cells is contacted with IL-15 (for example, hetIL-15 (IL15/sIL-15Ra)) and IL-6 (for example, IL-6/sIL-6Ra). In some embodiments, the population of cells is contacted with IL-21 and IL-6 (for example, IL-6/sIL-6Ra). In some embodiments, the population of cells is contacted with IL-7, IL-15 (for example, hetIL-15 (IL15/sIL-15Ra)), and IL-21. In some embodiments, the population of cells is further contacted with a LSD1 inhibitor. In some embodiments, the population of cells is further contacted with a MALT1 inhibitor.

[0639] In some embodiments, the population of cells is contacted with 20, 30, 40, 50, 60, 70, 80, 90, 100, 110, 120, 130, 140, 150, 160, 170, 180, 190, 200, 210, 220, 230, 240, 250, 260, 270, 280, 290, or 300 U/ml of IL-2. In some embodiments, the population of cells is contacted with 1, 2, 3, 4, 5, 6, 7, 8, 9, 10, 11, 12, 13, 14, 15, 16, 17, 18, 19, or 20 ng/ml of IL-7. In some embodiments, the population of cells is contacted with 1, 2, 3, 4, 5, 6, 7, 8, 9, 10, 11, 12, 13, 14, 15, 16, 17, 18, 19, or 20 ng/ml of IL-15.

[0640] In some embodiments, the population of cells is contacted with a nucleic acid molecule (e.g. one or more nucleic acid molecules) encoding a CAR. In some embodiments, the population of cells is transduced with a DNA molecule encoding a CAR.

[0641] In some embodiments, contacting the population of cells with the nucleic acid molecule encoding the CAR occurs simultaneously with contacting the population of cells with the one or more cytokines described above. In some embodiments, contacting the population of cells with the nucleic acid molecule encoding the CAR occurs no later than 1, 1.5, 2, 2.5, 3, 3.5, 4, 4.5, 5, 5.5, 6, 6.5, 7, 7.5, 8, 8.5, 9, 9.5 or 10 hours after the beginning of contacting the population of cells with the one or more cytokines described above. In some embodiments, contacting the population of cells with the nucleic acid molecule encoding the CAR occurs no later than 5 hours after the beginning of contacting the population of cells with the one or more cytokines described above. In some embodiments, contacting the population of cells with the nucleic acid molecule encoding the CAR occurs no later than 4 hours after the beginning of contacting the population of cells with the one or more cytokines described above.

[0642] In some embodiments, contacting the population of cells with the nucleic acid molecule encoding the CAR occurs no later than 3 hours after the beginning of contacting the population of cells with the one or more cytokines described above. In some embodiments, contacting the population of cells with the nucleic acid molecule encoding the CAR occurs no later than 2 hours after the beginning of contacting the population of cells with the one or more cytokines described above. In some embodiments, contacting the population of cells with the nucleic acid molecule encoding the CAR occurs no later than 1 hour after the beginning of contacting the population of cells with the one or more cytokines described above.

[0643] In some embodiments, the population of cells is harvested for storage or administration.

[0644] In some embodiments, the population of cells is harvested for storage or administration no later than 72, 60, 48, 36, 32, 31, 30, 29, 28, 27, 26, 25, 24, 23, 22, 21, 20, 19, or 18 hours after the beginning of contacting the population of cells with the one or more cytokines described above. In some embodiments, the population of cells is harvested for storage or administration no later than 26 hours after the beginning of contacting the population of cells with the one or more cytokines described above. In some embodiments, the population of cells is harvested for storage or administration no later than 25 hours after the beginning of contacting the population of cells with the one or more cytokines described above. In some embodiments, the population of cells is harvested for storage or administration no later than 24 hours after the beginning of contacting the population of cells with the one or more cytokines described above. In some embodiments, the population of cells is harvested for storage or administration no later than 23 hours after the beginning of contacting the population of cells with the one or more cytokines described above. In some embodiments, the population of cells is harvested for storage or administration no later than 22 hours after the beginning of contacting the population of cells with the one or more cytokines described above.

[0645] In some embodiments, the population of cells is not expanded ex vivo.

[0646] In some embodiments, the population of cells is expanded by no more than 5, 6, 7, 8, 9, 10, 11, 12, 13, 14, 15, 16, 17, 18, 19, 20, 25, 30, 35, 40, 45, 50, 55, or 60%, for example, as assessed by the number of living cells, compared to the population of cells before it is contacted with the one or more cytokines described above. In some embodiments, the population of cells is expanded by no more than 5%, for example, as assessed by the number of living cells, compared to the population of cells before it is contacted with the one or more cytokines described above. In some embodiments, the population of cells is expanded by no more than 10%, for example, as assessed by the number of living cells, compared to the population of cells before it is contacted with the one or more cytokines described above. In some embodiments, the population of cells is expanded by no more than 15%, for example, as assessed by the number of living cells, compared to the population of cells before it is contacted with the one or more cytokines described above. In some embodiments, the population of cells is expanded by no more than 20%, for example, as assessed by the number of living cells, compared to the population of cells before it is contacted with the one or more cytokines described above. In some embodiments, the population of cells is expanded by no more than 25%, for example, as assessed by the number of living cells, compared to the population of cells before it is contacted with the one or more cytokines described above. In some embodiments, the population of cells is expanded by no more than 30%, for example, as assessed by the number of living cells, compared to the population of cells before it is contacted with the one or more cytokines described above. In some embodiments, the population of cells is expanded by no more than 35%, for example, as assessed by the number of living cells, compared to the population of cells before it is contacted with the one or more cytokines described above. In some embodiments, the population of cells is expanded by no more than 40%, for example, as assessed by the number of living cells, compared to the population of cells before it is contacted with the one or more cytokines described above.

[0647] In some embodiments, the population of cells is expanded by no more than 1, 1.5, 2, 2.5, 3, 3.5, 4, 4.5, 5, 6, 7, 8, 9, 10, 11, 12, 16, 20, 24, 36, or 48 hours, for example, as assessed by the number of living cells, compared to the population of cells before it is contacted with the one or more cytokines described above.

[0648] In some embodiments, the population of cells is not contacted in vitro with an agent that stimulates a CD3/TCR complex (for example, an anti-CD3 antibody) and/or an agent that stimulates a costimulatory molecule on the surface of the cells (for example, an anti-CD28 antibody), or if contacted, the contacting step is less than 1, 1.5, 2, 2.5, 3, 3.5, 4, 4.5, or 5 hours.

[0649] In some embodiments, the population of cells is contacted in vitro with an agent that stimulates a CD3/TCR complex (for example, an anti-CD3 antibody) and/or an agent that stimulates a costimulatory molecule on the surface of the cells (for example, an anti-CD28 antibody) for 20, 21, 22, 23, 24, 25, 26, 27, or 28 hours.

[0650] In some embodiments, the population of cells manufactured using the cytokine process provided herein shows a higher percentage of naïve cells among CAR-expressing cells (for example, at least 5, 6, 7, 8, 9, 10, 11, 12, 13, 14, 15, 16, 17, 18, 19, 20, 25, 30, 35, 40, 45, 50, 55, or 60% higher), compared with cells made by an otherwise similar method which further comprises contacting the population of cells with, for example, an agent that binds a CD3/TCR complex (for example, an anti-CD3 antibody) and/or an agent that binds a costimulatory molecule on the surface of the cells (for example, an anti-CD28 antibody).

[0651] In some embodiments, the cytokine process provided herein is conducted in cell media comprising no more than 0, 0.5, 1, 1.5, 2, 2.5, 3, 3.5, 4, 4.5, 5, 5.5, 6, 6.5, 7, 7.5, or 8% serum. In some embodiments, the cytokine process provided herein is conducted in cell media comprising a LSD1 inhibitor, a MALT1 inhibitor, or a combination thereof.

### Additional Exemplary Manufacturing Methods

[0652] In some embodiments, cells, e.g., T cells or NK cells are activated, e.g., using anti-CD3/anti-CD28 antibody coated Dynabeads®, contacted with one or more nucleic acid molecules encoding a CAR and then expanded in vitro for, for example, 7, 8, 9, 10, or 11 days. In some embodiments, the cells, e.g., T cells or NK cells are selected from a fresh or cryopreserved leukapheresis sample, e.g., using positive or negative selection. In some embodiments, the cells are contacted with a nucleic acid molecule encoding a CAR, e.g., a CD19 CAR.

### Elutriation

[0653] In some embodiments, the methods described herein feature an elutriation method that removes unwanted cells, for example, monocytes and blasts, thereby resulting in an improved enrichment of desired immune effector cells suitable for CAR expression. In some embodiments, the elutriation method described herein is optimized for the enrichment of desired immune effector cells suitable for CAR expression from a previously frozen sample, for example, a thawed sample. In some embodiments, the elutriation method described herein provides a preparation of cells with improved purity as compared to a preparation of cells collected from the elutriation protocols known in the art. In some embodiments, the elutriation method described herein includes using an optimized viscosity of the starting sample, for example, cell sample, for example, thawed cell sample, by dilution with certain isotonic solutions (for example, PBS), and using an optimized combination of flow rates and collection volume for each fraction collected by an elutriation device. Exemplary elutriation methods that could be applied in the present disclosure are described on pages 48-51 of WO 2017/117112, herein incorporated by reference in its entirety.

### Density Gradient Centrifugation

[0654] Manufacturing of adoptive cell therapeutic product requires processing the desired cells, for example, immune effector cells, away from a complex mixture of blood cells and blood elements present in peripheral blood apheresis starting materials. Peripheral blood-derived lymphocyte samples have been successfully isolated using density gradient centrifugation through Ficoll solution. However, Ficoll is not a preferred reagent for isolating cells for therapeutic use, as Ficoll is not qualified for clinical use. In addition, Ficoll contains glycol, which has toxic potential to the cells. Furthermore, Ficoll density gradient centrifugation of thawed apheresis products after cryopreservation yields a suboptimal T cell product. For example, a loss of T cells in the final product, with a relative gain of non-T cells, especially undesirable B cells, blast cells and monocytes was observed in cell preparations isolated by density gradient centrifugation through Ficoll solution.

[0655] Without wishing to be bound by theory, it is believed that immune effector cells, for example, T cells, dehydrate during cryopreservation to become denser than fresh cells. Without wishing to be bound by theory, it is also believed that immune effector cells, for example, T cells, remain denser longer than the other blood cells, and thus are more readily lost during Ficoll density gradient separation as compared to other cells. Accordingly, without wishing to be bound by theory, a medium with a density greater than Ficoll is believed to provide improved isolation of desired immune effector cells in comparison to Ficoll or other mediums with the same density as Ficoll, for example, 1.077 g/mL.

[0656] In some embodiments, the density gradient centrifugation method described herein includes the use of a density gradient medium comprising iodixanol. In some embodiments, the density gradient medium comprises about 60% iodixanol in water.

[0657] In some embodiments, the density gradient centrifugation method described herein includes the use of a density gradient medium having a density greater than Ficoll. In some embodiments, the density gradient centrifugation method described herein includes the use of a density gradient medium having a density greater than 1.077 g/mL, for example, greater than 1.077 g/mL, greater than 1.1 g/mL, greater than 1.15 g/mL, greater than 1.2 g/mL, greater than 1.25 g/mL, greater than 1.3 g/mL, greater than 1.31 g/mL. In some embodiments, the density gradient medium has a density of about 1.32 g/mL.

[0658] Additional embodiments of density gradient centrifugation are described on pages 51-53 of WO 2017/117112, herein incorporated by reference in its entirety.

### Enrichment by Selection

[0659] Provided herein are methods for selection of specific cells to improve the enrichment of the desired immune effector cells suitable for CAR expression. In some embodiments, the selection comprises a positive selection, for example, selection for the desired immune effector cells. In some embodiments, the selection comprises a negative selection, for example, selection for unwanted cells, for example, removal of unwanted cells. In embodiments, the positive or negative selection methods described herein are performed under flow conditions, for example, by using a flow-through device, for example, a flow-through device described herein. Exemplary positive and negative selections are described on pages 53-57 of WO 2017/117112, herein incorporated by reference in its entirety. Selection methods can be performed under flow conditions, for example, by using a flow-through device, also referred to as a cell processing system, to further enrich a preparation of cells for desired immune effector cells, for example, T cells, suitable for CAR expression. Exemplary flow-through devices are described on pages 57-70 of WO 2017/117112, herein incorporated by reference in its entirety. Exemplary cell separation and debeading methods are described on pages 70-78 of WO 2017/117112, herein incorporated by reference in its entirety.

[0660] Selection procedures are not limited to ones described on pages 57-70 of WO 2017/117112. Negative T cell selection via removal of unwanted cells with CD19, CD14 and CD26 Miltenyi beads in combination with column technology (CliniMACS® Plus or CliniMACS® Prodigy©) or positive T cell selection with a combination of CD4 and CD8 Miltenyi beads and column technology (CliniMACS® Plus or CliniMACS® Prodigy©) can be used. Alternatively, column-free technology with releasable CD3 beads (GE Healthcare) can be used.

[0661] In addition, bead-free technologies such as ThermoGenesis X-series devices can be utilized as well.

### Clinical Applications

[0662] All of the processes herein may be conducted according to clinical good manufacturing practice (cGMP) standards.

[0663] The processes may be used for cell purification, enrichment, harvesting, washing, concentration or for cell media exchange, particularly during the collection of raw, starting materials (particularly cells) at the start of the manufacturing process, as well as during the manufacturing process for the selection or expansion of cells for cell therapy.

[0664] The cells may include any plurality of cells. The cells may be of the same cell type, or mixed cell types. In addition, the cells may be from one donor, such as an autologous donor or a single allogenic donor for cell therapy. The cells may be obtained from patients by, for example, leukapheresis or apheresis. The cells may include T cells, for example may include a population that has greater than 50% T cells, greater than 60% T cells, greater than 70% T cells, greater than 80% T cells, or 90% T cells.

[0665] Selection processes may be particularly useful in selecting cells prior to culture and expansion. For instance, paramagnetic particles coated with anti-CD3 and/or anti CD28 may be used to select T cells for expansion or for introduction of a nucleic acid encoding a chimeric antigen receptor (CAR) or other protein. Such a process is used to produce CTL019 T cells for treatment of acute lymphoblastic leukemia (ALL).

[0666] The debeading processes and modules disclosed herein may be particularly useful in the manufacture of cells for cell therapy, for example in purifying cells prior to, or after, culture and expansion. For instance, paramagnetic particles coated with anti-CD3 and/or anti CD28 antibodies may be used to selectively expand T cells, for example T cells that are, or will be, modified by introduction of a nucleic acid encoding a chimeric antigen receptor (CAR) or other protein, such that the CAR is expressed by the T cells. During the manufacture of such T cells, the debeading processes or modules may be used to separate T cells from the paramagnetic particles. Such a debeading process or module is used to produce, for example, CTL019 T cells for treatment of acute lymphoblastic leukemia (ALL).

[0667] In one such process, illustrated here by way of example, cells, for example, T cells, are collected from a donor (for example, a patient to be treated with an autologous chimeric antigen receptor T cell product) via apheresis (for example, leukapheresis). Collected cells may then be optionally purified, for example, by an elutriation step, or via positive or negative selection of target cells (for example, T cells). Paramagnetic particles, for example, anti-CD3/anti-CD28-coated paramagnetic particles, may then be added to the cell population, to expand the T cells. The process may also include a transduction step, wherein nucleic acid encoding one or more desired proteins, for example, a CAR, for example a CAR targeting CD19, is introduced into the cell. The nucleic acid may be introduced in a lentiviral vector. The cells, for example, the lentivirally transduced cells, may then be expanded for a period of days, for example, 1, 2, 3, 4, 5, 6, 7, 8, 9, 10, or more days, for example in the presence of a suitable medium. After expansion, the debeading processes/modules disclosed herein may be used to separate the desired T cells from the paramagnetic particles. The process may include one or more debeading steps according to the processes of the present disclosure. The debeaded cells may then be formulated for administration to the patient. Examples of CAR T cells and their manufacture are further described, for example, in WO2012/079000, which is incorporated herein by reference in its entirety. The systems and methods of the present disclosure may be used for any cell separation/purification/debeading processes described in or associated with WO2012/079000. Additional CAR T manufacturing processes are described in, for example, WO2016109410 and WO2017117112, herein incorporated by reference in their entireties.

[0668] The systems and methods herein may similarly benefit other cell therapy products by wasting fewer desirable cells, causing less cell trauma, and more reliably removing magnetic and any non-paramagnetic particles from cells with less or no exposure to chemical agents, as compared to conventional systems and methods.

[0669] Although only exemplary embodiments of the disclosure are specifically described above, it will be appreciated that modifications and variations of these examples are possible without departing from the spirit and intended scope of the disclosure. For example, the magnetic modules and systems containing them may be arranged and used in a variety of configurations in addition to those described. Besides, non-magnetic modules can be utilized as well. In addition, the systems and methods may include additional components and steps not specifically described herein. For instance, methods may include priming, where a fluid is first introduced into a component to remove bubbles and reduce resistance to cell suspension or buffer movement. Furthermore, embodiments may include only a portion of the systems described herein for use with the methods described herein. For example, embodiments may relate to disposable modules, hoses, etc. usable within non-disposable equipment to form a complete system able to separate or debead cells to produce a cell product.

[0670] Additional manufacturing methods and processes that can be combined with the present disclosure have been described in the art. For example, pages 86-91 of WO 2017/117112 describe improved wash steps and improved manufacturing process.

### Activation and Expansion of T Cells

[0671] T cells may be activated and expanded generally using methods as described, for example, in U.S. Pat. Nos. 6,352,694; 6,534,055; 6,905,680; 6,692,964; 5,858,358; 6,887,466; 6,905,681; 7,144,575; 7,067,318; 7,172,869; 7,232,566; 7,175,843; 5,883,223; 6,905,874; 6,797,514; 6,867,041; and U.S. Patent Application Publication No. 20060121005.

[0672] Generally, the T cells of the disclosure may be expanded by contact with a surface having attached thereto an agent that stimulates a CD3/TCR complex associated signal and a ligand that stimulates a costimulatory molecule on the surface of the T cells. In particular, T cell populations may be stimulated as described herein, such as by contact with an anti-CD3 antibody, or antigen-binding fragment thereof, or an anti-CD2 antibody immobilized on a surface, or by contact with a protein kinase C activator (e.g., bryostatin) in conjunction with a calcium ionophore. For co-stimulation of an accessory molecule on the surface of the T cells, a ligand that binds the accessory molecule is used. For example, a population of T cells can be contacted with an anti-CD3 antibody and an anti-CD28 antibody, under conditions appropriate for stimulating proliferation of the T cells. To stimulate proliferation of either CD4+ T cells or CD8+ T cells, an anti-CD3 antibody and an anti-CD28 antibody can be used. Examples of an anti-CD28 antibody include 9.3, B-T3, XR-CD28 (Diaclone, Besançon, France) can be used as can other methods commonly known in the art (Berg et al., Transplant Proc. 30(8):3975-3977, 1998; Haanen et al., J. Exp. Med. 190(9):13191328, 1999; Garland et al., J. Immunol Meth. 227(1-2):53-63, 1999).

[0673] In certain embodiments, the primary stimulatory signal and the costimulatory signal for the T cell may be provided by different protocols. For example, the agents providing each signal may be in solution or coupled to a surface. When coupled to a surface, the agents may be coupled to the same surface (i.e., in “cis” formation) or to separate surfaces (i.e., in “trans” formation). Alternatively, one agent may be coupled to a surface and the other agent in solution. In some embodiments, the agent providing the costimulatory signal is bound to a cell surface and the agent providing the primary activation signal is in solution or coupled to a surface. In certain embodiments, both agents can be in solution. In some embodiments, the agents may be in soluble form, and then cross-linked to a surface, such as a cell expressing Fc receptors or an antibody or other binding agent which will bind to the agents. In this regard, see for example, U.S. Patent Application Publication Nos. 20040101519 and 20060034810 for artificial antigen presenting cells (aAPCs) that are contemplated for use in activating and expanding T cells in the present disclosure.

[0674] In some embodiments, the two agents are immobilized on beads, either on the same bead, i.e., “cis,” or to separate beads, i.e., “trans.” By way of example, the agent providing the primary activation signal is an anti-CD3 antibody or an antigen-binding fragment thereof and the agent providing the costimulatory signal is an anti-CD28 antibody or antigen-binding fragment thereof, and both agents are co-immobilized to the same bead in equivalent molecular amounts. In some embodiments, a 1:1 ratio of each antibody bound to the beads for CD4+ T cell expansion and T cell growth is used. In certain embodiments of the present disclosure, a ratio of anti CD3:CD28 antibodies bound to the beads is used such that an increase in T cell expansion is observed as compared to the expansion observed using a ratio of 1:1. In some embodiments, an increase of from about 1 to about 3 fold is observed as compared to the expansion observed using a ratio of 1:1. In some embodiments, the ratio of CD3:CD28 antibody bound to the beads ranges from 100:1 to 1:100 and all integer values there between. In some embodiments of the present disclosure, more anti-CD28 antibody is bound to the particles than anti-CD3 antibody, i.e., the ratio of CD3:CD28 is less than one. In certain embodiments of the disclosure, the ratio of anti CD28 antibody to anti CD3 antibody bound to the beads is greater than 2:1. In some embodiments, a 1:100 CD3:CD28 ratio of antibody bound to beads is used. In some embodiments, a 1:75 CD3:CD28 ratio of antibody bound to beads is used. In some embodiments, a 1:50 CD3:CD28 ratio of antibody bound to beads is used. In some embodiments, a 1:30 CD3:CD28 ratio of antibody bound to beads is used. In some embodiments, a 1:10 CD3:CD28 ratio of antibody bound to beads is used. In some embodiments, a 1:3 CD3:CD28 ratio of antibody bound to the beads is used. In yet some embodiments, a 3:1 CD3:CD28 ratio of antibody bound to the beads is used.

[0675] Ratios of particles to cells from 1:500 to 500:1 and any integer values in between may be used to stimulate T cells or other target cells. As those of ordinary skill in the art can readily appreciate, the ratio of particles to cells may depend on particle size relative to the target cell. For example, small sized beads could only bind a few cells, while larger beads could bind many. In certain embodiments the ratio of cells to particles ranges from 1:100 to 100:1 and any integer values in-between and in further embodiments the ratio comprises 1:9 to 9:1 and any integer values in between, can also be used to stimulate T cells. The ratio of anti-CD3- and anti-CD28-coupled particles to T cells that result in T cell stimulation can vary as noted above, however certain preferred values include 1:100, 1:50, 1:40, 1:30, 1:20, 1:10, 1:9, 1:8, 1:7, 1:6, 1:5, 1:4, 1:3, 1:2, 1:1, 2:1, 3:1, 4:1, 5:1, 6:1, 7:1, 8:1, 9:1, 10:1, and 15:1 with one preferred ratio being at least 1:1 particles per T cell. In some embodiments, a ratio of particles to cells of 1:1 or less is used. In some embodiments, a preferred particle: cell ratio is 1:5. In further embodiments, the ratio of particles to cells can be varied depending on the day of stimulation. For example, in some embodiments, the ratio of particles to cells is from 1:1 to 10:1 on the first day and additional particles are added to the cells every day or every other day thereafter for up to 10 days, at final ratios of from 1:1 to 1:10 (based on cell counts on the day of addition). In some embodiments, the ratio of particles to cells is 1:1 on the first day of stimulation and adjusted to 1:5 on the third and fifth days of stimulation. In some embodiments, particles are added on a daily or every other day basis to a final ratio of 1:1 on the first day, and 1:5 on the third and fifth days of stimulation. In some embodiments, the ratio of particles to cells is 2:1 on the first day of stimulation and adjusted to 1:10 on the third and fifth days of stimulation. In some embodiments, particles are added on a daily or every other day basis to a final ratio of 1:1 on the first day, and 1:10 on the third and fifth days of stimulation. One of skill in the art will appreciate that a variety of other ratios may be suitable for use in the present disclosure. In particular, ratios will vary depending on particle size and on cell size and type. In some embodiments, the most typical ratios for use are in the neighborhood of 1:1, 2:1 and 3:1 on the first day.

[0676] In further embodiments of the present disclosure, the cells, such as T cells, are combined with agent-coated beads, the beads and the cells are subsequently separated, and then the cells are cultured. In some embodiments, prior to culture, the agent-coated beads and cells are not separated but are cultured together. In some embodiments, the beads and cells are first concentrated by application of a force, such as a magnetic force, resulting in increased ligation of cell surface markers, thereby inducing cell stimulation.

[0677] By way of example, cell surface proteins may be ligated by allowing paramagnetic beads to which anti-CD3 and anti-CD28 are attached (3×28 beads) to contact the T cells. In some embodiments, the cells (for example, 104 to 109 T cells) and beads (for example, DYNABEADS® M-450 CD3/CD28 T paramagnetic beads at a ratio of 1:1) are combined in a buffer, for example PBS (without divalent cations such as, calcium and magnesium). Again, those of ordinary skill in the art can readily appreciate any cell concentration may be used. For example, the target cell may be very rare in the sample and comprise only 0.01% of the sample or the entire sample (i.e., 100%) may comprise the target cell of interest. Accordingly, any cell number is within the context of the present disclosure. In certain embodiments, it may be desirable to significantly decrease the volume in which particles and cells are mixed together (i.e., increase the concentration of cells), to ensure maximum contact of cells and particles. For example, in some embodiments, a concentration of about 10 billion cells/ml, 9 billion/ml, 8 billion/ml, 7 billion/ml, 6 billion/ml, 5 billion/ml, or 2 billion cells/ml is used. In some embodiments, greater than 100 million cells/ml is used. In some embodiments, a concentration of cells of 10, 15, 20, 25, 30, 35, 40, 45, or 50 million cells/ml is used. In yet some embodiments, a concentration of cells from 75, 80, 85, 90, 95, or 100 million cells/ml is used. In further embodiments, concentrations of 125 or 150 million cells/ml can be used. Using high concentrations can result in increased cell yield, cell activation, and cell expansion. Further, use of high cell concentrations allows more efficient capture of cells that may weakly express target antigens of interest, such as CD28-negative T cells. Such populations of cells may have therapeutic value and would be desirable to obtain in certain embodiments. For example, using high concentration of cells allows more efficient selection of CD8+ T cells that normally have weaker CD28 expression.

[0678] In some embodiments, cells transduced with a nucleic acid encoding a CAR molecule, e.g., a CAR molecule described herein, are expanded, e.g., by a method described herein. In some embodiments, the cells are expanded in culture for a period of several hours (e.g., about 2, 3, 4, 5, 6, 7, 8, 9, 10, 15, 18, 21 hours) to about 14 days (e.g., 1, 2, 3, 4, 5, 6, 7, 8, 9, 10, 11, 12, 13 or 14 days). In some embodiments, the cells are expanded for a period of 4 to 9 days. In some embodiments, the cells are expanded for a period of 8 days or less, e.g., 7, 6 or 5 days. In some embodiments, the cells, e.g., a CAR-expressing cell described herein, are expanded in culture for 5 days, and the resulting cells are more potent than the same cells expanded in culture for 9 days under the same culture conditions. Potency can be defined, e.g., by various T cell functions, e.g. proliferation, target cell killing, cytokine production, activation, migration, or combinations thereof. In some embodiments, the cells, e.g., a CAR-expressing cell described herein, expanded for 5 days show at least a one, two, three or four fold increase in cells doublings upon antigen stimulation as compared to the same cells expanded in culture for 9 days under the same culture conditions. In some embodiments, the cells, e.g., the cells expressing a CAR molecule described herein, are expanded in culture for 5 days, and the resulting cells exhibit higher proinflammatory cytokine production, e.g., IFN-γ and/or GM-CSF levels, as compared to the same cells expanded in culture for 9 days under the same culture conditions. In some embodiments, the cells, e.g., a CAR-expressing cell described herein, expanded for 5 days show at least a one, two, three, four, five, ten fold or more increase in pg/ml of proinflammatory cytokine production, e.g., IFN-γ and/or GM-CSF levels, as compared to the same cells expanded in culture for 9 days under the same culture conditions.

[0679] In some embodiments of the present disclosure, the mixture may be cultured for several hours (about 3 hours) to about 14 days or any hourly integer value in between. In some embodiments, the mixture may be cultured for 21 days. In some embodiments of the disclosure, the beads and the T cells are cultured together for about eight days. In some embodiments, the beads and T cells are cultured together for 2-3 days. Several cycles of stimulation may also be desired such that culture time of T cells can be 60 days or more. Conditions appropriate for T cell culture include an appropriate media (e.g., Minimal Essential Media or RPMI Media 1640 or, X-vivo 15, (Lonza)) that may contain factors necessary for proliferation and viability, including serum (e.g., fetal bovine or human serum), interleukin-2 (IL-2), insulin, IFN-γ, IL-4, IL-7, GM-CSF, IL-1β, IL-12, IL-15, TGFβ, and TNF-α or any other additives for the growth of cells known to the skilled artisan. Other additives for the growth of cells include, but are not limited to, surfactant, plasmanate, and reducing agents such as N-acetyl-cysteine and 2-mercaptoethanol. Media can include RPMI 1640, AIM-V, DMEM, MEM, α-MEM, F-12, X-Vivo 15, and X-Vivo 20, Optimizer, with added amino acids, sodium pyruvate, and vitamins, either serum-free or supplemented with an appropriate amount of serum (or plasma) or a defined set of hormones, and/or an amount of cytokine(s) sufficient for the growth and expansion of T cells. Antibiotics, e.g., penicillin and streptomycin, are included only in experimental cultures, not in cultures of cells that are to be infused into a subject. The target cells are maintained under conditions necessary to support growth, for example, an appropriate temperature (e.g., 37° C.) and atmosphere (e.g., air plus 5% CO₂).

[0680] In some embodiments, the cells are expanded in an appropriate media (e.g., media described herein) that includes one or more interleukin that result in at least a 200-fold (e.g., 200-fold, 250-fold, 300-fold, 350-fold) increase in cells over a 14 day expansion period, e.g., as measured by a method described herein such as flow cytometry. In some embodiments, the cells are expanded in the presence of IL-15 and/or IL-7 (e.g., IL-15 and IL-7).

[0681] In embodiments, methods described herein, e.g., CAR-expressing cell manufacturing methods, comprise removing T regulatory cells, e.g., CD25+ T cells, from a cell population, e.g., using an anti-CD25 antibody, or fragment thereof, or a CD25-binding ligand, IL-2. Methods of removing T regulatory cells, e.g., CD25+ T cells, from a cell population are described herein. In embodiments, the methods, e.g., manufacturing methods, further comprise contacting a cell population (e.g., a cell population in which T regulatory cells, such as CD25+ T cells, have been depleted; or a cell population that has previously contacted an anti-CD25 antibody, fragment thereof, or CD25-binding ligand) with IL-15 and/or IL-7. For example, the cell population (e.g., that has previously contacted an anti-CD25 antibody, fragment thereof, or CD25-binding ligand) is expanded in the presence of IL-15 and/or IL-7.

[0682] In some embodiments a CAR-expressing cell described herein is contacted with a composition comprising a interleukin-15 (IL-15) polypeptide, a interleukin-15 receptor alpha (IL-15Ra) polypeptide, or a combination of both a IL-15 polypeptide and a IL-15Ra polypeptide e.g., hetIL-15, during the manufacturing of the CAR-expressing cell, e.g., ex vivo. In embodiments, a CAR-expressing cell described herein is contacted with a composition comprising a IL-15 polypeptide during the manufacturing of the CAR-expressing cell, e.g., ex vivo. In embodiments, a CAR-expressing cell described herein is contacted with a composition comprising a combination of both a IL-15 polypeptide and a IL-15 Ra polypeptide during the manufacturing of the CAR-expressing cell, e.g., ex vivo. In embodiments, a CAR-expressing cell described herein is contacted with a composition comprising hetIL-15 during the manufacturing of the CAR-expressing cell, e.g., ex vivo.

[0683] In some embodiments, the CAR-expressing cell described herein is contacted with a composition comprising hetIL-15 during ex vivo expansion. In some embodiments, the CAR-expressing cell described herein is contacted with a composition comprising an IL-15 polypeptide during ex vivo expansion. In some embodiments, the CAR-expressing cell described herein is contacted with a composition comprising both an IL-15 polypeptide and an IL-15Ra polypeptide during ex vivo expansion. In some embodiments the contacting results in the survival and proliferation of a lymphocyte subpopulation, e.g., CD8+ T cells.

[0684] T cells that have been exposed to varied stimulation times may exhibit different characteristics. For example, typical blood or apheresed peripheral blood mononuclear cell products have a helper T cell population (TH, CD4+) that is greater than the cytotoxic or suppressor T cell population. Ex vivo expansion of T cells by stimulating CD3 and CD28 receptors produces a population of T cells that prior to about days 8-9 consists predominately of TH cells, while after about days 8-9, the population of T cells comprises an increasingly greater population of TC cells. Accordingly, depending on the purpose of treatment, infusing a subject with a T cell population comprising predominately of TH cells may be advantageous. Similarly, if an antigen-specific subset of TC cells has been isolated it may be beneficial to expand this subset to a greater degree.

[0685] Further, in addition to CD4 and CD8 markers, other phenotypic markers vary significantly, but in large part, reproducibly during the course of the cell expansion process. Thus, such reproducibility enables the ability to tailor an activated T cell product for specific purposes.

[0686] Once a CAR molecule is constructed, various assays can be used to evaluate the activity of the molecule, such as but not limited to, the ability to expand T cells following antigen stimulation, sustain T cell expansion in the absence of re-stimulation, and anti-cancer activities in appropriate in vitro and animal models. Assays to evaluate the effects of a CAR molecule are described in further detail below.

[0687] Western blot analysis of CAR molecule expression in primary T cells can be used to detect the presence of monomers and dimers. See, e.g., Milone et al., Molecular Therapy 17(8): 1453-1464 (2009). Very briefly, T cells (1:1 mixture of CD4+ and CD8+ T cells) expressing the CAR molecules are expanded in vitro for more than 10 days followed by lysis and SDS-PAGE under reducing conditions. CAR molecules containing the full-length TCR-ξ cytoplasmic domain and the endogenous TCR-ξ chain are detected by western blotting using an antibody to the TCR-ξ chain. The same T cell subsets are used for SDS-PAGE analysis under non-reducing conditions to permit evaluation of covalent dimer formation.

[0688] In vitro expansion of CAR T cells following antigen stimulation can be measured by flow cytometry. For example, a mixture of CD4+ and CD8+ T cells are stimulated with αCD3/αCD28 aAPCs followed by transduction with lentiviral vectors expressing GFP under the control of the promoters to be analyzed. Exemplary promoters include the CMV IE gene, EF-1α, ubiquitin C, or phosphoglycerokinase (PGK) promoters. GFP fluorescence is evaluated on day 6 of culture in the CD4⁺ and/or CD8⁺ T cell subsets by flow cytometry. See, e.g., Milone et al., Molecular Therapy 17(8): 1453-1464 (2009). Alternatively, a mixture of CD4⁺ and CD8⁺ T cells are stimulated with αCD3/αCD28 coated magnetic beads on day 0, and transduced with the CAR on day 1 using a multicistronic lentiviral vector expressing the CAR along with eGFP using a 2A ribosomal skipping sequence. Cultures are re-stimulated with antigen-expressing cells, such as multiple myeloma cell lines or K562 expressing the antigen, following washing. Exogenous IL-2 is added to the cultures every other day at 100 IU/ml. GFP+ T cells are enumerated by flow cytometry using bead-based counting. See, e.g., Milone et al., Molecular Therapy 17(8): 1453-1464 (2009).

[0689] Sustained CAR+ T cell expansion in the absence of re-stimulation can also be measured. See, e.g., Milone et al., Molecular Therapy 17(8): 1453-1464 (2009). Briefly, mean T cell volume (fl) is measured on day 8 of culture using a Coulter Multisizer III particle counter, a Nexcelom Cellometer Vision or Millipore Scepter, following stimulation with αCD3/αCD28 coated magnetic beads on day 0, and transduction with the indicated CAR on day 1.

[0690] Animal models can also be used to measure a CART activity. For example, xenograft model using human antigen-specific CAR T cells to treat a primary human multiple myeloma in immunodeficient mice can be used. See, e.g., Milone et al., Molecular Therapy 17(8): 1453-1464 (2009). Very briefly, after establishment of MM, mice are randomized as to treatment groups. Different numbers of CAR T cells can be injected into immunodeficient mice bearing MM. Animals are assessed for disease progression and tumor burden at weekly intervals. Survival curves for the groups are compared using the log-rank test. In addition, absolute peripheral blood CD4⁺ and CD8⁺ T cell counts 4 weeks following T cell injection in the immunodeficient mice can also be analyzed. Mice are injected with multiple myeloma cells and 3 weeks later are injected with T cells engineered to express a CAR molecule. T cells are normalized to 45-50% input GFP⁺ T cells by mixing with mock-transduced cells prior to injection, and confirmed by flow cytometry. Animals are assessed for leukemia at 1-week intervals. Survival curves for the CAR T cell groups are compared using the log-rank test.

[0691] Assessment of cell proliferation and cytokine production has been previously described, e.g., at Milone et al., Molecular Therapy 17(8): 1453-1464 (2009). Briefly, assessment of CAR IL-15R/IL-15-mediated proliferation is performed in microtiter plates by mixing washed T cells with K562 cells expressing the antigen or other antigen-expressing myeloma cells are irradiated with gamma-radiation prior to use. Anti-CD3 (clone OKT3) and anti-CD28 (clone 9.3) monoclonal antibodies are added to cultures with KT32-BBL cells to serve as a positive control for stimulating T-cell proliferation since these signals support long-term CD8⁺ T cell expansion ex vivo. T cells are enumerated in cultures using CountBright™ fluorescent beads (Invitrogen, Carlsbad, CA) and flow cytometry as described by the manufacturer. CAR T cells are identified by GFP expression using T cells that are engineered with eGFP-2A linked CAR-expressing lentiviral vectors. For CAR positive T cells not expressing GFP, the CAR+ T cells are detected with biotinylated recombinant antigen protein and a secondary avidin-PE conjugate. CD4⁺ and CD8⁺ expression on T cells are also simultaneously detected with specific monoclonal antibodies (BD Biosciences). Cytokine measurements are performed on supernatants collected 24 hours following re-stimulation using the human TH1/TH2 cytokine cytometric bead array kit (BD Biosciences, San Diego, CA) according the manufacturer's instructions. Fluorescence is assessed using a FACScalibur flow cytometer, and data is analyzed according to the manufacturer's instructions.

[0692] Cytotoxicity can be assessed by a standard 51Cr-release assay. See, e.g., Milone et al., Molecular Therapy 17(8): 1453-1464 (2009). Briefly, target cells (e.g., K562 lines expressing the antigen and primary multiple myeloma cells) are loaded with 51Cr (as NaCrO4, New England Nuclear, Boston, MA) at 37° C. for 2 hours with frequent agitation, washed twice in complete RPMI and plated into microtiter plates. Effector T cells are mixed with target cells in the wells in complete RPMI at varying ratios of effector cell:target cell (E:T). Additional wells containing media only (spontaneous release, SR) or a 1% solution of triton-X 100 detergent (total release, TR) are also prepared. After 4 hours of incubation at 37° C., supernatant from each well is harvested. Released 51Cr is then measured using a gamma particle counter (Packard Instrument Co., Waltham, MA). Each condition is performed in at least triplicate, and the percentage of lysis is calculated using the formula: % Lysis=(ER−SR)/(TR−SR), where ER represents the average 51Cr released for each experimental condition. Alternatively, cytotoxicity can also be assessed using a Bright-Glo™ Luciferase Assay.

[0693] Imaging technologies can be used to evaluate specific trafficking and proliferation of CAR-expressing cells in tumor-bearing animal models. Such assays have been described, for example, in Barrett et al., Human Gene Therapy 22:1575-1586 (2011). Briefly, NOD/SCID/γc^{-/-} (NSG) mice or other immunodeficient are injected IV with multiple myeloma cells followed 7 days later with CART cells 4 hour after electroporation with the CAR or CAR constructs. The T cells are stably transfected with a lentiviral construct to express firefly luciferase, and mice are imaged for bioluminescence. Alternatively, therapeutic efficacy and specificity of a single injection of CAR+ T cells in a multiple myeloma xenograft model can be measured as the following: NSG mice are injected with multiple myeloma cells transduced to stably express firefly luciferase, followed by a single tail-vein injection of T cells electroporated with CAR construct days later. Animals are imaged at various time points post injection. For example, photon-density heat maps of firefly luciferase positive tumors in representative mice at day 5 (2 days before treatment) and day 8 (24 hr post CAR+ PBLs) can be generated.

[0694] Alternatively, or in combination to the methods disclosed herein, methods and compositions for one or more of: detection and/or quantification of CAR cells (e.g., in vitro or in vivo (e.g., clinical monitoring)); immune cell expansion and/or activation; and/or CAR-specific selection, that involve the use of a CAR ligand, are disclosed. In some embodiments, the CAR ligand is an antibody that binds to the CAR molecule, e.g., binds to the extracellular antigen-binding domain of CAR (e.g., an antibody that binds to the antigen-binding domain, e.g., an anti-idiotypic antibody; or an antibody that binds to a constant region of the extracellular binding domain). In other embodiments, the CAR ligand is a CAR antigen molecule (e.g., a CAR antigen molecule as described herein).

[0695] In some embodiments, a method for detecting and/or quantifying CAR-expressing cells is disclosed. For example, the CAR ligand can be used to detect and/or quantify CAR cells in vitro or in vivo (e.g., clinical monitoring of CAR-expressing cells in a patient, or dosing a patient). The method includes:
[0696] providing the CAR ligand (optionally, a labelled CAR ligand, e.g., a CAR ligand that includes a tag, a bead, a radioactive or fluorescent label);
[0697] acquiring the CAR-expressing cell (e.g., acquiring a sample containing CAR cells, such as a manufacturing sample or a clinical sample);
[0698] contacting the CAR-expressing cell with the CAR ligand under conditions where binding occurs, thereby detecting the level (e.g., amount) of the CAR-expressing cells present. Binding of the CAR-expressing cell with the CAR ligand can be detected using standard techniques such as FACS, ELISA and the like.

[0699] In some embodiments, a method of expanding and/or activating cells (e.g., immune effector cells) is disclosed. The method includes:
[0700] providing a CAR-expressing cell (e.g., a first CAR-expressing cell or a transiently expressing CAR cell);
[0701] contacting said CAR-expressing cell with a CAR ligand, e.g., a CAR ligand as described herein), under conditions where immune cell expansion and/or proliferation occurs, thereby producing the activated and/or expanded cell population.

[0702] In some embodiments, the CAR ligand is present on (e.g., is immobilized or attached to a substrate, e.g., a non-naturally occurring substrate). In some embodiments, the substrate is a non-cellular substrate. The non-cellular substrate can be a solid support chosen from, e.g., a plate (e.g., a microtiter plate), a membrane (e.g., a nitrocellulose membrane), a matrix, a chip or a bead. In embodiments, the CAR ligand is present in the substrate (e.g., on the substrate surface). The CAR ligand can be immobilized, attached, or associated covalently or non-covalently (e.g., cross-linked) to the substrate. In some embodiments, the CAR ligand is attached (e.g., covalently attached) to a bead. In the aforesaid embodiments, the immune cell population can be expanded in vitro or ex vivo. The method can further include culturing the population of immune cells in the presence of the ligand of the CAR molecule, e.g., using any of the methods described herein.

[0703] In other embodiments, the method of expanding and/or activating the cells further comprises addition of a second stimulatory molecule, e.g., CD28. For example, the CAR ligand and the second stimulatory molecule can be immobilized to a substrate, e.g., one or more beads, thereby providing increased cell expansion and/or activation.

[0704] In yet some embodiments, a method for selecting or enriching for a CAR-expressing cell is provided. The method includes contacting the CAR-expressing cell with a CAR ligand as described herein; and selecting the cell on the basis of binding of the CAR ligand.

[0705] In yet other embodiments, a method for depleting, reducing and/or killing a CAR expressing cell is provided. The method includes contacting the CAR-expressing cell with a CAR ligand as described herein; and targeting the cell on the basis of binding of the CAR ligand, thereby reducing the number, and/or killing, the CAR-expressing cell. In some embodiments, the CAR ligand is coupled to a toxic agent (e.g., a toxin or a cell ablative drug). In some embodiments, the anti-idiotypic antibody can cause effector cell activity, e.g., ADCC or ADC activities.

[0706] Exemplary anti-CAR antibodies that can be used in the methods disclosed herein are described, e.g., in WO 2014/190273 and by Jena et al., “Chimeric Antigen Receptor (CAR)-Specific Monoclonal Antibody to Detect CD19-Specific T cells in Clinical Trials”, PLOS Mar. 2013 8:3 e57838, the contents of which are incorporated by reference. In some embodiments, the anti-idiotypic antibody molecule recognizes an anti-CD19 antibody molecule, e.g., an anti-CD19 scFv. For instance, the anti-idiotypic antibody molecule can compete for binding with the CD19-specific CAR mAb clone no. 136.20.1 described in Jena et al., PLOS Mar. 2013 8:3 e57838; may have the same CDRs (e.g., one or more of, e.g., all of, VH CDR1, VH CDR2, CH CDR3, VL CDR1, VL CDR2, and VL CDR3, using the Kabat definition, the Chothia definition, or a combination of the Kabat and Chothia definitions) as the CD19-specific CAR mAb clone no. 136.20.1; may have one or more (e.g., 2) variable regions as the CD19-specific CAR mAb clone no. 136.20.1, or may comprise the CD19-specific CAR mAb clone no. 136.20.1. In some embodiments, the anti-idiotypic antibody was made according to a method described in Jena et al. In some embodiments, the anti-idiotypic antibody molecule is an anti-idiotypic antibody molecule described in WO 2014/190273. In some embodiments, the anti-idiotypic antibody molecule has the same CDRs (e.g., one or more of, e.g., all of, VH CDR1, VH CDR2, CH CDR3, VL CDR1, VL CDR2, and VL CDR3) as an antibody molecule of WO 2014/190273 such as 136.20.1; may have one or more (e.g., 2) variable regions of an antibody molecule of WO 2014/190273, or may comprise an antibody molecule of WO 2014/190273 such as 136.20.1. In other embodiments, the anti-CAR antibody binds to a constant region of the extracellular binding domain of the CAR molecule, e.g., as described in WO 2014/190273. In some embodiments, the anti-CAR antibody binds to a constant region of the extracellular binding domain of the CAR molecule, e.g., a heavy chain constant region (e.g., a CH2-CH3 hinge region) or light chain constant region. For instance, in some embodiments the anti-CAR antibody competes for binding with the 2D3 monoclonal antibody described in WO 2014/190273, has the same CDRs (e.g., one or more of, e.g., all of, VH CDR1, VH CDR2, CH CDR3, VL CDR1, VL CDR2, and VL CDR3) as 2D3, or has one or more (e.g., 2) variable regions of 2D3, or comprises 2D3 as described in WO 2014/190273.

[0707] In some embodiments, the compositions and methods herein are optimized for a specific subset of T cells, e.g., as described in U.S. Ser. No. 62/031,699 filed Jul. 31, 2014, the contents of which are incorporated herein by reference in their entirety. In some embodiments, the optimized subsets of T cells display an enhanced persistence compared to a control T cell, e.g., a T cell of a different type (e.g., CD8⁺ or CD4⁺) expressing the same construct.

[0708] In some embodiments, a CD4⁺ T cell comprises a CAR molecule described herein, which molecule CAR comprises an intracellular signaling domain suitable for (e.g., optimized for, e.g., leading to enhanced persistence in) a CD4⁺ T cell, e.g., an ICOS domain. In some embodiments, a CD8⁺ T cell comprises a CAR molecule described herein, which CAR molecule comprises an intracellular signaling domain suitable for (e.g., optimized for, e.g., leading to enhanced persistence of) a CD8⁺ T cell, e.g., a 4-1BB domain, a CD28 domain, or another costimulatory domain other than an ICOS domain.

[0709] In some embodiments, described herein is a method of treating a subject, e.g., a subject having cancer. The method includes administering to said subject, an effective amount of:
[0710] 1) a CD4⁺ T cell comprising a CAR molecule (the CAR^{CD4+})
[0711] comprising:
[0712] An antigen-binding domain, e.g., an antigen-binding domain described herein;
[0713] a transmembrane domain; and
[0714] an intracellular signaling domain, e.g., a first costimulatory domain, e.g., an ICOS domain; and
[0715] 2) a CD8′ T cell comprising a CAR molecule (the CAR^{CD8+}) comprising:
[0716] an antigen-binding domain, e.g., an antigen-binding domain described herein;
[0717] a transmembrane domain; and
[0718] an intracellular signaling domain, e.g., a second costimulatory domain, e.g., a 4-1BB domain, a CD28 domain, or another costimulatory domain other than an ICOS domain;
[0719] wherein the CAR^{CD4+} and the CAR^{CD8+} differ from one another.

[0720] Optionally, the method further includes administering:
[0721] 3) a second CD8⁺ T cell comprising a CAR molecule (the second CAR^{CD8+}) comprising:
[0722] an antigen-binding domain, e.g., an antigen-binding domain described herein;
[0723] a transmembrane domain; and
[0724] an intracellular signaling domain, wherein the second CAR^{CD8+} comprises an intracellular signaling domain, e.g., a costimulatory signaling domain, not present on the CAR^{CD8+} and, optionally, does not comprise an ICOS signaling domain.

[0725] Other assays, including those that are known in the art can also be used to evaluate the CAR molecules of the disclosure.

Combination Therapies with CAR Cells

[0726] CAR-expressing cells described herein can be used in combination with other known agents and therapies. Administered “in combination”, as used herein, means that two (or more) different treatments are delivered to the subject during the course of the subject's affliction with the disorder, e.g., the two or more treatments are delivered after the subject has been diagnosed with the disorder and before the disorder has been cured or eliminated or treatment has ceased for other reasons. In some embodiments, the delivery of one treatment is still occurring when the delivery of the second begins, so that there is overlap in terms of administration. This is sometimes referred to herein as “simultaneous” or “concurrent delivery”. In other embodiments, the delivery of one treatment ends before the delivery of the other treatment begins. In some embodiments of either case, the treatment is more effective because of combined administration. For example, the second treatment is more effective, e.g., an equivalent effect is seen with less of the second treatment, or the second treatment reduces symptoms to a greater extent, than would be seen if the second treatment were administered in the absence of the first treatment, or the analogous situation is seen with the first treatment. In some embodiments, delivery is such that the reduction in a symptom, or other parameter related to the disorder is greater than what would be observed with one treatment delivered in the absence of the other. The effect of the two treatments can be partially additive, wholly additive, or greater than additive. The delivery can be such that an effect of the first treatment delivered is still detectable when the second is delivered.

[0727] A CAR-expressing cell described herein and the at least one additional therapeutic agent can be administered simultaneously, in the same or in separate compositions, or sequentially. For sequential administration, the CAR-expressing cell described herein can be administered first, and the additional agent can be administered second, or the order of administration can be reversed.

[0728] The CAR therapy and/or other therapeutic agents, procedures or modalities can be administered during periods of active disorder, or during a period of remission or less active disease. The CAR therapy can be administered before the other treatment, concurrently with the treatment, post-treatment, or during remission of the disorder.

[0729] When administered in combination, the CAR therapy and the additional agent (e.g., second or third agent), or all, can be administered in an amount or dose that is higher, lower or the same than the amount or dosage of each agent used individually, e.g., as a monotherapy. In some embodiments, the administered amount or dosage of the CAR therapy, the additional agent (e.g., second or third agent), or all, is lower (e.g., at least 20%, at least 30%, at least 40%, or at least 50%) than the amount or dosage of each agent used individually, e.g., as a monotherapy. In other embodiments, the amount or dosage of the CAR therapy, the additional agent (e.g., second or third agent), or all, that results in a desired effect (e.g., treatment of cancer) is lower (e.g., at least 20%, at least 30%, at least 40%, or at least 50% lower) than the amount or dosage of each agent used individually, e.g., as a monotherapy, required to achieve the same therapeutic effect.

[0730] In some embodiments, the disclosure discloses a combination therapy including a CAR-expressing cell therapy described herein, an RNA molecule described herein (or a nucleic acid molecule encoding the RNA molecule), and an additional therapeutic agent.

### Biopolymer CAR Delivery Methods

[0731] In some embodiments, one or more CAR-expressing cells as disclosed herein can be administered or delivered to the subject via a biopolymer scaffold, e.g., a biopolymer implant. Biopolymer scaffolds can support or enhance the delivery, expansion, and/or dispersion of the CAR-expressing cells described herein. A biopolymer scaffold comprises a biocompatible (e.g., does not substantially induce an inflammatory or immune response) and/or a biodegradable polymer that can be naturally occurring or synthetic.

[0732] Examples of suitable biopolymers include, but are not limited to, agar, agarose, alginate, alginate/calcium phosphate cement (CPC), beta-galactosidase (β-GAL), (1,2,3,4,6-pentaacetyl a-D-galactose), cellulose, chitin, chitosan, collagen, elastin, gelatin, hyaluronic acid collagen, hydroxyapatite, poly(3-hydroxybutyrate-co-3-hydroxy-hexanoate) (PHBHHx), poly(lactide), poly(caprolactone) (PCL), poly(lactide-co-glycolide) (PLG), polyethylene oxide (PEO), poly(lactic-co-glycolic acid) (PLGA), polypropylene oxide (PPO), polyvinyl alcohol) (PVA), silk, soy protein, and soy protein isolate, alone or in combination with any other polymer composition, in any concentration and in any ratio. The biopolymer can be augmented or modified with adhesion- or migration-promoting molecules, e.g., collagen-mimetic peptides that bind to the collagen receptor of lymphocytes, and/or stimulatory molecules to enhance the delivery, expansion, or function, e.g., anti-cancer activity, of the cells to be delivered. The biopolymer scaffold can be an injectable, e.g., a gel or a semi-solid, or a solid composition.

[0733] In some embodiments, CAR-expressing cells described herein are seeded onto the biopolymer scaffold prior to delivery to the subject. In embodiments, the biopolymer scaffold further comprises one or more additional therapeutic agents described herein (e.g., another CAR-expressing cell, an antibody, or a small molecule) or agents that enhance the activity of a CAR-expressing cell, e.g., incorporated or conjugated to the biopolymers of the scaffold. In embodiments, the biopolymer scaffold is injected, e.g., intratumorally, or surgically implanted at the tumor or within a proximity of the tumor sufficient to mediate an anti-tumor effect. Additional examples of biopolymer compositions and methods for their delivery are described in Stephan et al., Nature Biotechnology, 2015, 33:97-101; and WO2014/110591.

### Pharmaceutical Compositions and Treatments Relating to CAR Cells

[0734] Pharmaceutical compositions of the present disclosure can comprise a CAR-expressing cell, e.g., a plurality of CAR-expressing cells, as described herein, in combination with one or more pharmaceutically or physiologically acceptable carriers, diluents or excipients. Such compositions may comprise buffers such as neutral buffered saline, phosphate buffered saline and the like; carbohydrates such as glucose, mannose, sucrose or dextrans, mannitol; proteins; polypeptides or amino acids such as glycine; antioxidants; chelating agents such as EDTA or glutathione; adjuvants (e.g., aluminum hydroxide); and preservatives. Compositions of the present disclosure are in some embodiments formulated for intravenous administration.

[0735] Pharmaceutical compositions of the present disclosure may be administered in a manner appropriate to the disease to be treated (or prevented). The quantity and frequency of administration will be determined by such factors as the condition of the patient, and the type and severity of the patient's disease, although appropriate dosages may be determined by clinical trials.

[0736] In some embodiments, the pharmaceutical composition is substantially free of, e.g., there are no detectable levels of a contaminant, e.g., selected from the group consisting of endotoxin, mycoplasma, replication competent lentivirus (RCL), β₂₄, VSV-G nucleic acid, HIV gag, residual anti-CD3/anti-CD28 coated beads, mouse antibodies, pooled human serum, bovine serum albumin, bovine serum, culture media components, vector packaging cell or plasmid components, a bacterium and a fungus. In some embodiments, the bacterium is at least one selected from the group consisting of Alcaligenes faecalis, Candida albicans, Escherichia coli, Haemophilus influenza, Neisseria meningitides, Pseudomonas aeruginosa, Staphylococcus aureus, Streptococcus pneumonia, and Streptococcus pyogenes group A.

[0737] When “an immunologically effective amount,” “an anti-tumor effective amount,” “a tumor-inhibiting effective amount,” or “therapeutic amount” is indicated, the precise amount of the compositions of the present disclosure to be administered can be determined by a physician with consideration of individual differences in age, weight, tumor size, extent of infection or metastasis, and condition of the patient (subject). It can generally be stated that a pharmaceutical composition comprising the T cells described herein may be administered at a dosage of 104 to 10⁹ cells/kg body weight, in some instances 105 to 10⁶ cells/kg body weight, including all integer values within those ranges. T cell compositions may also be administered multiple times at these dosages. The cells can be administered by using infusion techniques that are commonly known in immunotherapy (see, e.g., Rosenberg et al., New Eng. J. of Med. 319:1676, 1988).

[0738] In certain embodiments, it may be desired to administer activated T cells to a subject and then subsequently redraw blood (or have an apheresis performed), activate T cells therefrom according to the present disclosure, and reinfuse the patient with these activated and expanded T cells. This process can be carried out multiple times every few weeks. In certain embodiments, T cells can be activated from blood draws of from 10 cc to 400 cc. In certain embodiments, T cells are activated from blood draws of 20 cc, 30 cc, 40 cc, 50 cc, 60 cc, 70 cc, 80 cc, 90 cc, or 100 cc.

[0739] The administration of the subject compositions may be carried out in any convenient manner, including by aerosol inhalation, injection, ingestion, transfusion, implantation or transplantation. The compositions described herein may be administered to a patient trans arterially, subcutaneously, intradermally, intratumorally, intranodally, intramedullary, intramuscularly, by intravenous (i.v.) injection, or intraperitoneally. In some embodiments, the T cell compositions of the present disclosure are administered to a patient by intradermal or subcutaneous injection. In some embodiments, the CAR-expressing cell (e.g., T cell or NK cell) compositions of the present disclosure are administered by i.v. injection. The compositions of CAR-expressing cells (e.g., T cells or NK cells) may be injected directly into a tumor, lymph node, or site of infection.

[0740] In some embodiments, subjects may undergo leukapheresis, wherein leukocytes are collected, enriched, or depleted ex vivo to select and/or isolate the cells of interest, e.g., immune effector cells (e.g., T cells or NK cells). These immune effector cell (e.g., T cell or NK cell) isolates may be expanded by methods known in the art and treated such that one or more CAR constructs of the disclosure may be introduced, thereby creating a CAR-expressing cell (e.g., CAR T cell or CAR-expressing NK cell) of the disclosure. Subjects in need thereof may subsequently undergo standard treatment with high dose chemotherapy followed by peripheral blood stem cell transplantation. In certain embodiments, following or concurrent with the transplant, subjects receive an infusion of the expanded CAR-expressing cells (e.g., CAR T cells or NK cells) of the present disclosure. In some embodiments, expanded cells are administered before or following surgery.

[0741] In embodiments, lymphodepletion is performed on a subject, e.g., prior to administering one or more cells that express a CAR molecule described herein. In embodiments, the lymphodepletion comprises administering one or more of melphalan, cytoxan, cyclophosphamide, and fludarabine.

[0742] The dosage of the above treatments to be administered to a patient will vary with the precise nature of the condition being treated and the recipient of the treatment. The scaling of dosages for human administration can be performed according to art-accepted practices. The dose for CAMPATH, for example, will generally be in the range 1 to about 100 mg for an adult patient, usually administered daily for a period between 1 and 30 days. The preferred daily dose is 1 to 10 mg per day although in some instances larger doses of up to 40 mg per day may be used (described in U.S. Pat. No. 6,120,766).

[0743] In some embodiments, the CAR molecule is introduced into immune effector cells (e.g., T cells or NK cells), e.g., using in vitro transcription, and the subject (e.g., human) receives an initial administration of CAR immune effector cells (e.g., T cells or NK cells) of the disclosure, and one or more subsequent administrations of the CAR immune effector cells (e.g., T cells or NK cells) of the disclosure, wherein the one or more subsequent administrations are administered less than 15 days, e.g., 14, 13, 12, 11, 10, 9, 8, 7, 6, 5, 4, 3, or 2 days after the previous administration. In some embodiments, more than one administration of the CAR immune effector cells (e.g., T cells or NK cells) of the disclosure are administered to the subject (e.g., human) per week, e.g., 2, 3, or 4 administrations of the CAR immune effector cells (e.g., T cells or NK cells) of the disclosure are administered per week. In some embodiments, the subject (e.g., human subject) receives more than one administration of the CAR immune effector cells (e.g., T cells or NK cells) per week (e.g., 2, 3 or 4 administrations per week) (also referred to herein as a cycle), followed by a week of no CAR immune effector cells (e.g., T cells or NK cells) administrations, and then one or more additional administration of the CAR immune effector cells (e.g., T cells or NK cells) (e.g., more than one administration of the CAR immune effector cells (e.g., T cells or NK cells) per week) is administered to the subject. In some embodiments, the subject (e.g., human subject) receives more than one cycle of CAR immune effector cells (e.g., T cells or NK cells), and the time between each cycle is less than 10, 9, 8, 7, 6, 5, 4, or 3 days. In some embodiments, the CAR immune effector cells (e.g., T cells or NK cells) are administered every other day for 3 administrations per week. In some embodiments, the CAR immune effector cells (e.g., T cells or NK cells) of the disclosure are administered for at least two, three, four, five, six, seven, eight or more weeks.

[0744] In some embodiments, CAR-expressing cells (e.g., CARTs or CAR-expressing NK cells) are generated using lentiviral viral vectors, such as lentivirus. CAR-expressing cells (e.g., CARTs or CAR-expressing NK cells) generated that way will have stable CAR expression.

[0745] In some embodiments, CAR-expressing cells, e.g., CARTs, are generated using a viral vector such as a gammaretroviral vector, e.g., a gammaretroviral vector described herein. CARTs generated using these vectors can have stable CAR expression.

[0746] In some embodiments, CAR-expressing cells (e.g., CARTs or CAR-expressing NK cells) transiently express CAR vectors for 4, 5, 6, 7, 8, 9, 10, 11, 12, 13, 14, 15 days after transduction. Transient expression of CAR molecules can be effected by RNA CAR vector delivery. In some embodiments, the CAR RNA is transduced into the cell, e.g., T cell or NK cell, by electroporation.

[0747] A potential issue that can arise in patients being treated using transiently expressing CAR-expressing cells (e.g., CARTs or CAR-expressing NK cells) (particularly with murine scFv bearing CAR-expressing cells (e.g., CARTs or CAR-expressing NK cells)) is anaphylaxis after multiple treatments.

[0748] Without being bound by this theory, it is believed that such an anaphylactic response might be caused by a patient developing humoral anti-CAR response, i.e., anti-CAR antibodies having an anti-IgE isotype. It is thought that a patient's antibody producing cells undergo a class switch from IgG isotype (that does not cause anaphylaxis) to IgE isotype when there is a ten to fourteen day break in exposure to antigen.

[0749] If a patient is at high risk of generating an anti-CAR antibody response during the course of transient CAR therapy (such as those generated by RNA transductions), CAR-expressing cell (e.g., CART or CAR-expressing NK cell) infusion breaks should not last more than ten to fourteen days.

### Methods Using Biomarkers for Evaluating CAR-Effectiveness, Subject Suitability, or Sample Suitability

[0750] In some embodiments, the disclosure features a method of evaluating or monitoring the effectiveness of a CAR-expressing cell therapy in a subject (e.g., a subject having a cancer). The method includes acquiring a value of effectiveness to the CAR therapy, subject suitability, or sample suitability, wherein said value is indicative of the effectiveness or suitability of the CAR-expressing cell therapy.

[0751] In some embodiments of any of the methods disclosed herein, the subject is evaluated prior to receiving, during, or after receiving, the CAR-expressing cell therapy.

[0752] In some embodiments of any of the methods disclosed herein, a responder (e.g., a complete responder) has, or is identified as having, a greater level or activity of one, two, or more (all) of GZMK, PPF1BP2, or naïve T cells as compared to a non-responder.

[0753] In some embodiments of any of the methods disclosed herein, a non-responder has, or is identified as having, a greater level or activity of one, two, three, four, five, six, seven, or more (e.g., all) of IL22, IL-2RA, IL-21, IRF8, IL8, CCL17, CCL22, effector T cells, or regulatory T cells, as compared to a responder.

[0754] In some embodiments, a relapser is a patient having, or who is identified as having, an increased level of expression of one or more of (e.g., 2, 3, 4, or all of) the following genes, compared to non relapsers: MIR199A1, MIR1203, uc02lovp, ITM2C, and HLA-DQB1 and/or a decreased levels of expression of one or more of (e.g., 2, 3, 4, 5, 6, 7, 8, 9, 10, 11, or all of) the following genes, compared to non relapsers: PPIAL4D, TTTY10, TXLNG2P, MIR4650-1, KDM5D, USP9Y, PRKY, RPS4Y2, RPS4Y1, NCRNA00185, SULT1E1, and EIF1AY.

[0755] In some embodiments of any of the methods disclosed herein, a non-responder has, or is identified as having, a greater percentage of an immune cell exhaustion marker, e.g., one, two or more immune checkpoint inhibitors (e.g., PD-1, PD-L1, TIM-3 and/or LAG-3). In some embodiments, a non-responder has, or is identified as having, a greater percentage of PD-1, PD-L1, or LAG-3 expressing immune effector cells (e.g., CD4+ T cells and/or CD8+ T cells) (e.g., CAR-expressing CD4+ cells and/or CD8+ T cells) compared to the percentage of PD-1 or LAG-3 expressing immune effector cells from a responder.

[0756] In some embodiments, a non-responder has, or is identified as having, a greater percentage of immune cells having an exhausted phenotype, e.g., immune cells that co-express at least two exhaustion markers, e.g., co-expresses PD-1, PD-L1 and/or TIM-3. In other embodiments, a non-responder has, or is identified as having, a greater percentage of immune cells having an exhausted phenotype, e.g., immune cells that co-express at least two exhaustion markers, e.g., co-expresses PD-1 and LAG-3.

[0757] In some embodiments of any of the methods disclosed herein, a non-responder has, or is identified as having, a greater percentage of PD-1/PD-L1⁺/LAG-3⁺ cells in the CARexpressing cell population compared to a responder (e.g., a complete responder) to the CAR-expressing cell therapy.

[0758] In some embodiments of any of the methods disclosed herein, a partial responder has, or is identified as having, a higher percentages of PD-1/PD-L1⁺/LAG-3⁺ cells, than a responder, in the CAR-expressing cell population.

[0759] In some embodiments of any of the methods disclosed herein, a non-responder has, or is identified as having, an exhausted phenotype of PD1/PD-L1⁺ CAR+ and co-expression of LAG3 in the CAR-expressing cell population.

[0760] In some embodiments of any of the methods disclosed herein, a non-responder has, or is identified as having, a greater percentage of PD-1/PD-L1⁺/TIM-3⁺ cells in the CAR-expressing cell population compared to the responder (e.g., a complete responder).

[0761] In some embodiments of any of the methods disclosed herein, a partial responders has, or is identified as having, a higher percentage of PD-1/PD-L1⁺/TIM-3⁺ cells, than responders, in the CAR-expressing cell population.

[0762] In some embodiments of any of the methods disclosed herein, the presence of CD8⁺ CD27⁺ CD45RO− T cells in an apheresis sample is a positive predictor of the subject response to a CAR-expressing cell therapy.

[0763] In some embodiments of any of the methods disclosed herein, a high percentage of PD1⁺ CAR+ and LAG3⁺ or TIM3⁺ T cells in an apheresis sample is a poor prognostic predictor of the subject response to a CAR-expressing cell therapy.

[0764] In some embodiments of any of the methods disclosed herein, the responder (e.g., the complete or partial responder) has one, two, three or more (or all) of the following profile:
[0765] (i) has a greater number of CD27⁺μmmune effector cells compared to a reference value, e.g., a non-responder number of CD27⁺μmmune effector cells;
[0766] (ii) has a greater number of CD8⁺ T cells compared to a reference value, e.g., a non-responder number of CD8⁺ T cells;
[0767] (iii) has a lower number of immune cells expressing one or more checkpoint inhibitors, e.g., a checkpoint inhibitor chosen from PD-1, PD-L1, LAG-3, TIM-3, or KLRG-1, or a combination, compared to a reference value, e.g., a non-responder number of cells expressing one or more checkpoint inhibitors; or
[0768] (iv) has a greater number of one, two, three, four or more (all) of resting T_{EFF} cells, resting T_{REG} cells, naïve CD4 cells, unstimulated memory cells or early memory T cells, or a combination thereof, compared to a reference value, e.g., a non-responder number of resting T_{EFF} cells, resting T_{REG} cells, naïve CD4 cells, unstimulated memory cells or early memory T cells.

[0769] In some embodiments of any of the methods disclosed herein, the cytokine level or activity is chosen from one, two, three, four, five, six, seven, eight, or more (or all) of cytokine CCL20/MIP3a, IL17A, IL6, GM-CSF, IFN-γ, IL10, IL13, IL2, IL21, IL4, IL5, IL9 or TNFα, or a combination thereof. The cytokine can be chosen from one, two, three, four or more (all) of IL-17a, CCL20, IL2, IL6, or TNFα. In some embodiments, an increased level or activity of a cytokine is chosen from one or both of IL-17a and CCL20, is indicative of increased responsiveness or decreased relapse. In embodiments, the responder, a non-responder, a relapser or a non-relapser identified by the methods herein can be further evaluated according to clinical criteria. For example, a complete responder has, or is identified as, a subject having a disease, e.g., a cancer, who exhibits a complete response, e.g., a complete remission, to a treatment. A complete response may be identified, e.g., using the NCCN Guidelines®, or Cheson et al, J Clin Oncol 17:1244 (1999) and Cheson et al., “Revised Response Criteria for Malignant Lymphoma”, J Clin Oncol 25:579-586 (2007) (both of which are incorporated by reference herein in their entireties), as described herein. A partial responder has, or is identified as, a subject having a disease, e.g., a cancer, who exhibits a partial response, e.g., a partial remission, to a treatment. A partial response may be identified, e.g., using the NCCN Guidelines®, or Cheson criteria as described herein. A non-responder has, or is identified as, a subject having a disease, e.g., a cancer, who does not exhibit a response to a treatment, e.g., the patient has stable disease or progressive disease. A non-responder may be identified, e.g., using the NCCN Guidelines®, or Cheson criteria as described herein.

[0770] Alternatively, or in combination with the methods disclosed herein, responsive to said value, performing one, two, three, four or more of:
[0771] administering e.g., to a responder or a non-relapser, a CAR-expressing cell therapy;
[0772] administered an altered dosing of a CAR-expressing cell therapy;
[0773] altering the schedule or time course of a CAR-expressing cell therapy;
[0774] administering, e.g., to a non-responder or a partial responder, an additional agent in combination with a CAR-expressing cell therapy, e.g., a checkpoint inhibitor, e.g., a checkpoint inhibitor described herein;
[0775] administering to a non-responder or partial responder a therapy that increases the number of younger T cells in the subject prior to treatment with a CAR-expressing cell therapy;
[0776] modifying a manufacturing process of a CAR-expressing cell therapy, e.g., enriching for younger T cells prior to introducing a nucleic acid encoding a CAR molecule, or increasing the transduction efficiency, e.g., for a subject identified as a non-responder or a partial responder;
[0777] administering an alternative therapy, e.g., for a non-responder or partial responder or relapser; or
[0778] if the subject is, or is identified as, a non-responder or a relapser, decreasing the T_{REG} cell population and/or T_{REG} gene signature, e.g., by one or more of CD25 depletion, administration of cyclophosphamide, anti-GITR antibody, or a combination thereof.

[0779] In some embodiments, the subject is pre-treated with an anti-GITR antibody. In some embodiments, the subject is treated with an anti-GITR antibody prior to infusion or re-infusion.

### Method of Treating Cancer Using ZBTB32 Inhibitors

[0780] In one aspect, the disclosure relates to treatment of a subject in vivo using a ZBTB32 inhibitor (e.g., a ZBTB32 inhibitor described herein), alone or in combination with a second therapeutic agent or modality (e.g., a therapeutic agent or modality disclosed herein), or a composition or formulation comprising a combination disclosed herein, such that growth of cancerous tumors is inhibited or reduced.

[0781] In one embodiment, the ZBTB32 inhibitor or combination disclosed herein is suitable for the treatment of cancer in vivo. For example, the ZBTB32 inhibitor or combination can be used to inhibit the growth of cancerous tumors. The ZBTB32 inhibitor or combination can also be used in combination with one or more of: a standard of care treatment (e.g., for cancers or infectious disorders), a vaccine (e.g., a therapeutic cancer vaccine), a cell therapy, a radiation therapy, surgery, or any other therapeutic agent or modality, to treat a disorder herein. For example, to achieve antigen-specific enhancement of immunity, the combination can be administered together with an antigen of interest. A combination disclosed herein can be administered in either order or simultaneously.

[0782] In another aspect, a method of treating a subject, e.g., reducing or ameliorating, a hyperproliferative condition or disorder (e.g., a cancer), e.g., solid tumor, a hematological cancer, soft tissue tumor, or a metastatic lesion, in a subject is provided. The method includes administering to the subject a ZBTB32 inhibitor (e.g., a ZBTB32 inhibitor described herein), alone or in combination with a second therapeutic agent or modality (e.g., a therapeutic agent or modality disclosed herein), or a composition or formulation comprising a combination disclosed herein, e.g., in accordance with a dosage regimen disclosed herein.

[0783] As used herein, the term “cancer” is meant to include all types of cancerous growths or oncogenic processes, metastatic tissues or malignantly transformed cells, tissues, or organs, irrespective of histopathological type or stage of invasiveness. Examples of cancerous disorders include, but are not limited to, solid tumors, hematological cancers, soft tissue tumors, and metastatic lesions. Examples of solid tumors include malignancies, e.g., sarcomas, and carcinomas (including adenocarcinomas and squamous cell carcinomas), of the various organ systems, such as those affecting liver, lung, breast, lymphoid, gastrointestinal (e.g., colon), genitourinary tract (e.g., renal, urothelial, bladder cells), prostate, CNS (e.g., brain, neural or glial cells), skin, pancreas, and pharynx. Adenocarcinomas include malignancies such as most colon cancers, rectal cancer, renal-cell carcinoma, liver cancer, non-small cell carcinoma of the lung, cancer of the small intestine and cancer of the esophagus. Squamous cell carcinomas include malignancies, e.g., in the lung, esophagus, skin, head and neck region, oral cavity, anus, and cervix. Metastatic lesions of the aforementioned cancers can also be treated or prevented using the methods and compositions of the disclosure.

[0784] In some embodiments, the cancer is chosen from a breast cancer, a pancreatic cancer, a colorectal cancer, a skin cancer, a gastric cancer, or an ER+ cancer. In some embodiments, the skin cancer is a melanoma (e.g., a refractory melanoma). In some embodiments, the ER+ cancer is an ER+ breast cancer. In some embodiments, the cancer is an Epstein Barr Virus (EBV) positive cancer.

[0785] Exemplary cancers whose growth can be inhibited using the combinations disclosed herein, include cancers typically responsive to immunotherapy. Non-limiting examples of typical cancers for treatment include melanoma (e.g., metastatic malignant melanoma), renal cancer (e.g., clear cell carcinoma), prostate cancer (e.g., hormone refractory prostate adenocarcinoma), breast cancer, colon cancer and lung cancer (e.g., non-small cell lung cancer). Additionally, refractory or recurrent malignancies can be treated using the antibody molecules described herein.

[0786] Examples of other cancers that can be treated include, but are not limited to, basal cell carcinoma, biliary tract cancer; bladder cancer; bone cancer; brain and CNS cancer; primary CNS lymphoma; neoplasm of the central nervous system (CNS); breast cancer; cervical cancer; choriocarcinoma; colon and rectum cancer; connective tissue cancer; cancer of the digestive system; endometrial cancer; esophageal cancer; eye cancer; cancer of the head and neck; gastric cancer; intra-epithelial neoplasm; kidney cancer; larynx cancer; leukemia (including acute myeloid leukemia, chronic myeloid leukemia, acute lymphoblastic leukemia, chronic lymphocytic leukemia, chronic or acute leukemia); liver cancer; lung cancer (e.g., small cell and non-small cell); lymphoma including Hodgkin's and non-Hodgkin's lymphoma; lymphocytic lymphoma; melanoma, e.g., cutaneous or intraocular malignant melanoma; myeloma; neuroblastoma; oral cavity cancer (e.g., lip, tongue, mouth, and pharynx); ovarian cancer; pancreatic cancer; prostate cancer; retinoblastoma; rhabdomyosarcoma; rectal cancer; cancer of the respiratory system; sarcoma; skin cancer; stomach cancer; testicular cancer; thyroid cancer; uterine cancer; cancer of the urinary system, hepatocarcinoma, cancer of the anal region, carcinoma of the fallopian tubes, carcinoma of the vagina, carcinoma of the vulva, cancer of the small intestine, cancer of the endocrine system, cancer of the parathyroid gland, cancer of the adrenal gland, sarcoma of soft tissue, cancer of the urethra, cancer of the penis, solid tumors of childhood, spinal axis tumor, brain stem glioma, pituitary adenoma, Kaposi's sarcoma, epidermoid cancer, squamous cell cancer, T-cell lymphoma, environmentally induced cancers including those induced by asbestos, as well as other carcinomas and sarcomas, and combinations of said cancers.

[0787] In some embodiments, the disorder is a cancer, e.g., a cancer described herein. In certain embodiments, the cancer is a solid tumor. In some embodiments, the cancer is brain tumor, e.g., a glioblastoma, a gliosarcoma, or a recurrent brain tumor. In some embodiments, the cancer is a pancreatic cancer, e.g., an advanced pancreatic cancer. In some embodiments, the cancer is a skin cancer, e.g., a melanoma (e.g., a stage II-IV melanoma, an HLA-A2 positive melanoma, an unresectable melanoma, or a metastatic melanoma), or a Merkel cell carcinoma. In some embodiments, the cancer is a renal cancer, e.g., a renal cell carcinoma (RCC) (e.g., a metastatic renal cell carcinoma) or a treatment-naïve metastatic kidney cancer. In some embodiments, the cancer is a breast cancer, e.g., a metastatic breast carcinoma or a stage IV breast carcinoma, e.g., a triple negative breast cancer (TNBC). In some embodiments, the cancer is a virus-associated cancer. In some embodiments, the cancer is an anal canal cancer (e.g., a squamous cell carcinoma of the anal canal). In some embodiments, the cancer is a cervical cancer (e.g., a squamous cell carcinoma of the cervix). In some embodiments, the cancer is a gastric cancer (e.g., an Epstein Barr Virus (EBV) positive gastric cancer, or a gastric or gastro-esophageal junction carcinoma). In some embodiments, the cancer is a head and neck cancer (e.g., an HPV positive and negative squamous cell cancer of the head and neck (SCCHN)). In some embodiments, the cancer is a nasopharyngeal cancer (NPC). In some embodiments, the cancer is a penile cancer (e.g., a squamous cell carcinoma of the penile). In some embodiments, the cancer is a vaginal or vulvar cancer (e.g., a squamous cell carcinoma of the vagina or vulva). In some embodiments, the cancer is a colorectal cancer, e.g., a relapsed colorectal cancer, a metastatic colorectal cancer, e.g., a microsatellite unstable colorectal cancer, a microsatellite stable colorectal cancer, a mismatch repair proficient colorectal cancer, or a mismatch repair deficient colorectal cancer. In some embodiments, the cancer is a lung cancer, e.g., a non-small cell lung cancer (NSCLC). In certain embodiments, the cancer is a hematological cancer. In some embodiments, the cancer is a leukemia. In some embodiments, the cancer is a lymphoma, e.g., a Hodgkin lymphoma (HL) or a diffuse large B cell lymphoma (DLBCL) (e.g., a relapsed or refractory HL or DLBCL). In some embodiments, the cancer is a myeloma. In some embodiments, the cancer is an MSI-high (MSI-H) cancer. In some embodiments, the cancer is a metastatic cancer. In other embodiments, the cancer is an advanced cancer. In other embodiments, the cancer is a relapsed or refractory cancer.

[0788] In one embodiment, the cancer is a Merkel cell carcinoma. In other embodiments, the cancer is a melanoma. In other embodiments, the cancer is a breast cancer, e.g., a triple negative breast cancer (TNBC) or a HER2-negative breast cancer. In other embodiments, the cancer is a renal cell carcinoma (e.g., a clear cell renal cell carcinoma (CCRCC) or a non-clear cell renal cell carcinoma (nccRCC)). In other embodiments, the cancer is a thyroid cancer, e.g., an anaplastic thyroid carcinoma (ATC). In other embodiments, the cancer is a neuroendocrine tumor (NET), e.g., an atypical pulmonary carcinoid tumor or a NET in pancreas, gastrointestinal (GI) tract, or lung. In certain embodiments, the cancer is a non-small cell lung cancer (NSCLC) (e.g., a squamous NSCLC or a non-squamous NSCLC). In certain embodiments, the cancer is a fallopian tube cancer. In certain embodiments, the cancer is a microsatellite instability-high colorectal cancer (MSI-high CRC) or a microsatellite stable colorectal cancer (MSS CRC).

[0789] In other embodiments, the cancer is a hematological malignancy or cancer including but is not limited to a leukemia or a lymphoma. For example, the combination can be used to treat cancers and malignancies including, but not limited to, e.g., an acute leukemia, e.g., B-cell acute lymphoid leukemia (“BALL”), T-cell acute lymphoid leukemia (“TALL”), acute lymphoid leukemia (ALL); a chronic leukemia, e.g., chronic myelogenous leukemia (CML), chronic lymphocytic leukemia (CLL); an additional hematologic cancer or hematologic condition, e.g., B cell prolymphocytic leukemia, blastic plasmacytoid dendritic cell neoplasm, Burkitt's lymphoma, diffuse large B cell lymphoma, Follicular lymphoma, Hairy cell leukemia, small cell- or a large cell-follicular lymphoma, malignant lymphoproliferative conditions, MALT lymphoma, mantle cell lymphoma, Marginal zone lymphoma, multiple myeloma, myelodysplasia and myelodysplastic syndrome, non-Hodgkin's lymphoma, plasmablastic lymphoma, plasmacytoid dendritic cell neoplasm, Waldenstrom macroglobulinemia, and “preleukemia” which are a diverse collection of hematological conditions united by ineffective production (or dysplasia) of myeloid blood cells, and the like.

[0790] As used herein, the term “subject” is intended to include human and non-human animals. In some embodiments, the subject is a human subject, e.g., a human patient having a disorder or condition characterized by abnormal immune checkpoint functioning. For example, the subject has at least some PD-1 protein, including the PD-1 epitope that is bound by an anti-PD-1 antibody molecule, e.g., a high enough level of the protein and epitope to support antibody binding to PD-1. The term “non-human animals” includes mammals and non-mammals, such as non-human primates. In some embodiments, the subject is a human. In some embodiments, the subject is a human patient in need of enhancement of an immune response. The methods and compositions described herein are suitable for treating human patients having a disorder that can be treated by modulating (e.g., augmenting or inhibiting) an immune response. In certain embodiments, the cancer is a cancer for which the immune response is deficient or an immunogenic cancer.

[0791] Methods and compositions disclosed herein are useful for treating metastatic lesions associated with the aforementioned cancers.

[0792] In some embodiments, the method further comprises determining whether a tumor sample is positive for one or more of PD-L1, CD8, and IFN-γ, and if the tumor sample is positive for one or more, e.g., two, or all three, of the markers, then administering to the patient a therapeutically effective amount of a combination of therapeutic agents, as described herein.

[0793] In some embodiments, the ZBTB32 inhibitor or combination is used to treat a cancer that expresses one or more of the biomarkers disclosed herein. In certain embodiments, the subject or cancer is treated responsive to the determination of the presence of one or more biomarkers disclosed herein.

[0794] In other embodiments, the ZBTB32 inhibitor or combination is used to treat a cancer that is characterized by microsatellite instability-high (MSI-H) or mismatch repair deficient (dMMR). The identification of MSI-H or dMMR tumor status for patients can be determined using, e.g., polymerase chain reaction (PCR) tests for MSI-H status or immunohistochemistry (IHC) tests for dMMR. Methods for identification of MSI-H or dMMR tumor status are described, e.g., in Ryan et al. Crit Rev Oncol Hematol. 2017; 116:38-57; Dietmaier and Hofstadter. Lab Invest 2001, 81:1453-1456; Kawakami et al. Curr Treat Options Oncol. 2015; 16(7): 30).

[0795] The combination therapies described herein can include a composition of the present disclosure co-formulated with, and/or co-administered with, one or more additional therapeutic agents, e.g., one or more anti-cancer agents, cytotoxic or cytostatic agents, hormone treatment, vaccines, and/or other immunotherapies. In other embodiments, the combination is further administered or used in combination with other therapeutic treatment modalities, including surgery, radiation, cryosurgery, and/or thermotherapy. Such combination therapies may advantageously utilize lower dosages of the administered therapeutic agents, thus avoiding possible toxicities or complications associated with the various monotherapies.

[0796] When administered in combination, the therapeutic agent can be administered in an amount or dose that is higher or lower than, or the same as, the amount or dosage of each agent used individually, e.g., as a monotherapy. In certain embodiments, the administered amount or dosage of the therapeutic agent is lower (e.g., at least 20%, at least 30%, at least 40%, or at least 50%) than the amount or dosage of each agent used individually, e.g., as a monotherapy. In other embodiments, the amount or dosage of the therapeutic agent that results in a desired effect (e.g., treatment of cancer) is lower (e.g., at least 20%, at least 30%, at least 40%, or at least 50% lower).

Combination Therapy with ZBTB32 Inhibitors

[0797] The ZBTB32 inhibitors of the disclosure can be administered in therapeutically effective amounts in a combinational therapy with one or more therapeutic agents (pharmaceutical combinations) or modalities, e.g., non-drug therapies. For example, synergistic effects can occur with other cancer agents. Where the ZBTB32 inhibitors of the disclosure are administered in conjunction with other therapies, dosages of the co-administered ZBTB32 inhibitors will of course vary depending on the type of co-drug employed, on the specific drug employed, on the condition being treated and so forth.

[0798] The ZBTB32 inhibitors can be administered simultaneously (as a single preparation or separate preparation), sequentially, separately, or over a period of time to the other drug therapy or treatment modality. In general, a combination therapy envisions administration of two or more drugs during a single cycle or course of therapy. A therapeutic agent is, for example, a chemical compound, peptide, antibody, antibody fragment or nucleic acid, which is therapeutically active or enhances the therapeutic activity when administered to a patient in combination with a compound of the present disclosure.

[0799] In one aspect, a ZBTB32 inhibitor, or a pharmaceutically acceptable salt, hydrate, solvate, prodrug, stereoisomer, or tautomer thereof, of the present disclosure can be combined with other therapeutic agents, such as other anti-cancer agents, anti-allergic agents, anti-nausea agents (or anti-emetics), pain relievers, cytoprotective agents, and combinations thereof.

[0800] In some embodiments, the ZBTB32 inhibitor, or a pharmaceutically acceptable salt, hydrate, solvate, prodrug, stereoisomer, or tautomer thereof of the present disclosure are administered in combination with one or more second agent(s) selected from a PD-1 inhibitor, a PD-L1 inhibitor, a LAG-3 inhibitor, a cytokine, an A2aR antagonist, a GITR agonist, a TIM-3 inhibitor, a STING agonist, a CTLA-4 inhibitor, a TIGIT inhibitor, a chimeric antigen receptor, an estrogen receptor antagonist, a CDK4/6 inhibitor, a CXCR2 inhibitor, a CSF-1/1R binding agent, an IDO inhibitor, a Galectin inhibitor, a MEK inhibitor, a c-MET inhibitor, a TGF-b inhibitor, an IL-1b inhibitor, an MDM2 inhibitor, and a TLR7 agonist, to treat a disease, e.g., cancer.

[0801] In some embodiments, the ZBTB32 inhibitor is used in combination with an agonist of a costimulatory molecule chosen from one or more of OX40, CD2, CD27, CDS, ICAM-1, LFA-1 (CD11a/CD18), ICOS (CD278), 4-1BB (CD137), GITR, CD30, CD40, BAFFR, HVEM, CD7, LIGHT, NKG2C, SLAMF7, NKp80, CD160, B7-H3 or CD83 ligand.

[0802] In some embodiments, the ZBTB32 inhibitor is used in combination with an inhibitor of an immune checkpoint molecule chosen from one or more of PD-L1, PD-L2, CTLA-4, TIM-3, LAG-3, CEACAM-1, CEACAM-5, VISTA, BTLA, TIGIT, LAIR1, CD160, 2B4 or TGFβ.

[0803] In another embodiment, one or more chemotherapeutic agents are used in combination with the ZBTB32 inhibitor, or a pharmaceutically acceptable salt, hydrate, solvate, prodrug, stereoisomer, or tautomer thereof, for treating a disease, e.g., cancer, wherein said chemotherapeutic agents include, but are not limited to, anastrozole (Arimidex®), bicalutamide (Casodex®), bleomycin sulfate (Blenoxane®), busulfan (Myleran®), busulfan injection (Busulfex®), capecitabine (Xeloda®), N4-pentoxycarbonyl-5-deoxy-5-fluorocytidine, carboplatin (Paraplatin®), carmustine (BiCNU®), chlorambucil (Leukeran®), cisplatin (Platinol®), cladribine (Leustatin®), cyclophosphamide (Cytoxan® orNeosar®), cytarabine, cytosine arabinoside (Cytosar-U®), cytarabine liposome injection (DepoCyt®), dacarbazine (DTIC-Dome®), dactinomycin (Actinomycin D, Cosmegan), daunorubicin hydrochloride (Cerubidine®), daunorubicin citrate liposome injection (DaunoXome®), dexamethasone, docetaxel (Taxotere®), doxorubicin hydrochloride (Adriamycin®, Rubex®), etoposide (Vepesid®), fludarabine phosphate (Fludara®), 5-fluorouracil (Adrucil®, Efudex®), flutamide (Eulexin®), tezacitibine, Gemcitabine (difluorodeoxycitidine), hydroxyurea (Hydrea®), Idarubicin (Idamycin®), ifosfamide (IFEX®), irinotecan (Camptosar®), L-asparaginase (ELSPAR®), leucovorin calcium, melphalan (Alkeran®), 6-mercaptopurine (Purinethol®), methotrexate (Folex®), mitoxantrone (Novantrone®), mylotarg, paclitaxel (Taxol®), phoenix (Yttrium90/MX-DTPA), pentostatin, polifeprosan 20 with carmustine implant (Gliadel®), tamoxifen citrate (Nolvadex®), teniposide (Vumon®), 6-thioguanine, thiotepa, tirapazamine (Tirazone®), topotecan hydrochloride for injection (Hycamptin®), vinblastine (Velban®), vincristine (Oncovin®), vinorelbine (Navelbine®), epirubicin (Ellence®), oxaliplatin (Eloxatin®), exemestane (Aromasin®), letrozole (Femara®), and fulvestrant (Faslodex®).

[0804] In other embodiments, the ZBTB32 inhibitor, or a pharmaceutically acceptable salt, hydrate, solvate, prodrug, stereoisomer, or tautomer thereof, of the present disclosure are used in combination with one or more other anti-HER2 antibodies, e.g., trastuzumab, pertuzumab, margetuximab, or HT-19 described above, or with other anti-HER2 conjugates, e.g., ado-trastuzumab emtansine (also known as Kadcyla®, or T-DM1).

[0805] In other embodiments, the ZBTB32 inhibitors, or a pharmaceutically acceptable salt, hydrate, solvate, prodrug, stereoisomer, or tautomer thereof, of the present disclosure are used in combination with one or more tyrosine kinase inhibitors, including but not limited to, EGFR inhibitors, Her3 inhibitors, IGFR inhibitors, and Met inhibitors, for treating a disease, e.g., cancer.

[0806] For example, tyrosine kinase inhibitors include but are not limited to, Erlotinib hydrochloride (Tarceva®); Linifanib (N-[4-(3-amino-1H-indazol-4-yl)phenyl]-N′-(2-fluoro-5-methylphenyl)urea, also known as ABT 869, available from Genentech); Sunitinib malate (Sutent®); Bosutinib (4-[(2,4-dichloro-5-methoxyphenyl)amino]-6-methoxy-7-[3-(4-methylpiperazin-1-yl)propoxy]quinoline-3-carbonitrile, also known as SKI-606, and described in U.S. Pat. No. 6,780,996); Dasatinib (Sprycel®); Pazopanib (Votrient®); Sorafenib (Nexavar®); Zactima (ZD6474); and Imatinib or Imatinib mesylate (Gilvec® and Gleevec®).

[0807] Epidermal growth factor receptor (EGFR) inhibitors include but are not limited to, Erlotinib hydrochloride (Tarceva®), Gefitinib (Iressa®); N-[4-[(3-Chloro-4-fluorophenyl)amino]-7-[[(3″S″)-tetrahydro-3-furanyl]oxy]-6-quinazolinyl]-4(dimethylamino)-2-butenamide, Tovok®); Vandetanib (Caprelsa®); Lapatinib (Tykerb®); (3R,4R)-4-Amino-1-((4-((3-methoxyphenyl)amino)pyrrolo[2,1-f][1,2,4]triazin-5-yl)methyl)piperidin-3-ol (BMS690514); Canertinib dihydrochloride (CI-1033); 6-[4-[(4-Ethyl-1-piperazinyl)methyl]phenyl]-N-[(1R)-1-phenylethyl]-7H-Pyrrolo[2,3-d]pyrimidin-4-amine (AEE788, CAS 497839-62-0); Mubritinib (TAK165); Pelitinib (EKB569); Afatinib (Gilotrif®); Neratinib (HKI-272); N-[4-[[1-[(3-Fluorophenyl)methyl]-1H-indazol-5-yl]amino]-5-methylpyrrolo[2,1-f][1,2,4]triazin-6-yl]-carbamic acid, (3S)-3-morpholinylmethyl ester (BMS599626); N-(3,4-Dichloro-2-fluorophenyl)-6-methoxy-7-[[(3aa,5 p,6aa)-octahydro-2-methylcyclopenta[c]pyrrol-5-yl]methoxy]-4-quinazolinamine (XL647, CAS 781613-23-8); and 4-[4-[[(1R)-1-Phenylethyl]amino]-7H-pyrrolo[2,3-d]pyrimidin-6-yl]-phenol (PKI166, CAS187724-61-4).

[0808] EGFR antibodies include but are not limited to, Cetuximab (Erbitux®); Panitumumab (Vectibix®); Matuzumab (EMD-72000); Nimotuzumab (hR3); Zalutumumab; TheraCIM h-R3; MDX0447 (CAS 339151-96-1); and ch806 (mAb-806, CAS 946414-09-1).

[0809] Other HER2 inhibitors include but are not limited to, Neratinib (HKI-272, (2E)-N-[4-[[3-chloro-4-[(pyridin-2-yl)methoxy]phenyl]amino]-3-cyano-7-ethoxyquinolin-6-yl]-4-(dimethylamino)but-2-enamide, and described PCT Publication No. WO 05/028443); Lapatinib or Lapatinib ditosylate (Tykerb®); (3R,4R)-4-amino-1-((4-((3-methoxyphenyl)amino)pyrrolo[2,1-f][1,2,4]triazin-5-yl)methyl)piperidin-3-ol (BMS690514); (2E)-N-[4-[(3-Chloro-4-fluorophenyl)amino]-7-[[(3S)-tetrahydro-3-furanyl]oxy]-6-quinazolinyl]-4-(dimethylamino)-2-butenamide (BIBW-2992, CAS 850140-72-6); N-[4-[[1-[(3-Fluorophenyl)methyl]-1H-indazol-5-yl]amino]-5-methylpyrrolo[2,1-f][1,2,4]triazin-6-yl]-carbamic acid, (3S)-3-morpholinylmethyl ester (BMS 599626, CAS 714971-09-2); Canertinib dihydrochloride (PD183805 or CI-1033); and N-(3,4-Dichloro-2-fluorophenyl)-6-methoxy-7-[[(3aa,5 p,6aa)-octahydro-2-methylcyclopenta[c]pyrrol-5-yl]methoxy]-4-quinazolinamine (XL647, CAS 781613-23-8).

[0810] HER3 inhibitors include but are not limited to, LJM716, MM-121, AMG-888, RG7116, REGN-1400, AV-203, MP-RM-1, MM-111, and MEHD-7945A.

[0811] MET inhibitors include but are not limited to, Cabozantinib (XL184, CAS 849217-68-1); Foretinib (GSK1363089, formerly XL880, CAS 849217-64-7); Tivantinib (ARQ197, CAS 1000873-98-2); 1-(2-Hydroxy-2-methylpropyl)-N-(5-(7-methoxyquinolin-4-yloxy)pyridin-2-yl)-5-methyl-3-oxo-2-phenyl-2,3-dihydro-1H-pyrazole-4-carboxamide (AMG 458); Cryzotinib (Xalkori®, PF-02341066); (3Z)-5-(2,3-Dihydro-1H-indol-1-ylsulfonyl)-3-({3,5-dimethyl-4-[(4-methylpiperazin-1-yl)carbonyl]-1H-pyrrol-2-yl}methylene)-1,3-dihydro-2H-indol-2-one (SU11271); (3Z)—N-(3-Chlorophenyl)-3-({3,5-dimethyl-4-[(4-methylpiperazin-1-yl)carbonyl]-1H-pyrrol-2-yl}methylene)-N-methyl-2-oxoindoline-5-sulfonamide (SU11274); (3Z)—N-(3-Chlorophenyl)-3-{[3,5-dimethyl-4-(3-morpholin-4-ylpropyl)-1H-pyrrol-2-yl]methylene}-N-methyl-2-oxoindoline-5-sulfonamide (SU11606); 6-[Difluoro[6-(1-methyl-1Hpyrazol-4-yl)-1,2,4-triazolo[4,3-b]pyridazin-3-yl]methyl]-quinoline (JNJ38877605, CAS 943540-75-8); 2-[4-[1-(Quinolin-6-ylmethyl)-1H-[1,2,3]triazolo[4,5-b]pyrazin-6-yl]-1H-pyrazol-1-yl]ethanol (PF04217903, CAS 956905-27-4); N-((2R)-1,4-Dioxan-2-ylmethyl)-N-methyl-N′-[3-(1-methyl-1H-pyrazol-4-yl)-5-oxo-5H-benzo[4,5]cyclohepta[1,2-b]pyridin-7-yl]sulfamide (MK2461, CAS 917879-39-1); 6-[[6-(1-Methyl-1H-pyrazol-4-yl)-1,2,4-triazolo[4,3-b]pyridazin 3-yl]thio]-quinoline (SGX523, CAS 1022150-57-7); and (3Z)-5-[[(2,6-Dichlorophenyl)methyl]sulfonyl]-3-[[3,5-dimethyl-4-[[(2R)-2-(1-pyrrolidinylmethyl)-1-pyrrolidinyl]carbonyl]-1H-pyrrol-2-yl]methylene]-1,3-dihydro-2H-indol-2-one (PHA665752, CAS 477575-56-7).

[0812] IGFR inhibitors include but are not limited to, BMS-754807, XL-228, OSI-906, GSK0904529A, A-928605, AXL1717, KW-2450, MK0646, AMG479, IMCA12, MEDI-573, and B1836845. See e.g., Yee, JNCI, 104; 975 (2012) for review.

[0813] In another embodiment, the ZBTB32 inhibitor of the present disclosure are used in combination with one or more proliferation signalling pathway inhibitors, including but not limited to, MEK inhibitors, BRAF inhibitors, PI3K/Akt inhibitors, SHP2 inhibitors, and also mTOR inhibitors, and CDK inhibitors, for treating a disease, e.g., cancer.

[0814] For example, mitogen-activated protein kinase (MEK) inhibitors include but are not limited to, XL-518 (also known as GDC-0973, CAS No. 1029872-29-4, available from ACC Corp.); 2-[(2-Chloro-4-iodophenyl)amino]-N-(cyclopropylmethoxy)-3,4-difluoro-benzamide (also known as CI-1040 or PD184352 and described in PCT Publication No. WO2000035436); N-[(2R)-2,3-Dihydroxypropoxy]-3,4-difluoro-2-[(2-fluoro-4-iodophenyl)amino]-benzamide (also known as PD0325901 and described in PCT Publication No. WO2002006213); 2,3-Bis[amino[(2-aminophenyl)thio]methylene]-butanedinitrile (also known as U0126 and described in U.S. Pat. No. 2,779,780); N-[3,4-Difluoro-2-[(2-fluoro-4-iodophenyl)amino]-6-methoxyphenyl]-1-[(2R)-2,3-dihydroxypropyl]-cyclopropanesulfonamide (also known as RDEA119 or BAY869766 and described in PCT Publication No. WO2007014011); (3S,4R,5Z,8S,9S,11E)-14-(Ethylamino)-8,9,16-trihydroxy-3,4-dimethyl-3,4,9, 19-tetrahydro-1H-2-benzoxacyclotetradecine-1,7(8H)-dione] (also known as E6201 and described in PCT Publication No. WO2003076424); 2′-Amino-3′-methoxyflavone (also known as PD98059 available from Biaffin GmbH & Co., KG, Germany); (R)-3-(2,3-Dihydroxypropyl)-6-fluoro-5-(2-fluoro-4-iodophenylamino)-8-methylpyrido[2,3-d]pyrimidine-4,7(3H,8H)-dione (TAK-733, CAS 1035555-63-5); Pimasertib (AS-703026, CAS 1204531-26-9); and Trametinib dimethyl sulfoxide (GSK-1120212, CAS 1204531-25-80).

[0815] BRAF inhibitors include, but are not limited to, Vemurafenib (or Zelboraf®, PLX-4032, CAS 918504-65-1), GDC-0879, PLX-4720 (available from Symansis), Dabrafenib (or GSK2118436), LGX 818, CEP-32496, UI-152, RAF 265, Regorafenib (BAY 73-4506), CCT239065, or Sorafenib (or Sorafenib Tosylate, or Nexavar®).

[0816] Phosphoinositide 3-kinase (PI3K) inhibitors include, but are not limited to, 4-[2-(1H-Indazol-4-yl)-6-[[4-(methylsulfonyl)piperazin-1-yl]methyl]thieno[3,2-d]pyrimidin-4-yl]morpholine (also known as GDC0941, RG7321, GNE0941, Pictrelisib, or Pictilisib; and described in PCT Publication Nos. WO 09/036082 and WO 09/055730); Tozasertib (VX680 or MK-0457, CAS 639089-54-6); (5Z)-5-[[4-(4-Pyridinyl)-6-quinolinyl]methylene]-2,4-thiazolidinedione (GSK1059615, CAS 958852-01-2); (1E,4S,4aR,5R,6aS,9aR)-5-(Acetyloxy)-1-[(di-2-propenylamino)methylene]-4,4a,5,6,6a,8,9,9a-octahydro-11-hydroxy-4-(methoxymethyl)-4a,6a-dimethylcyclopenta[5,6]naphtho[1,2-c]pyran-2,7,10(1H)-trione (PX866, CAS 502632-66-8); 8-Phenyl-2-(morpholin-4-yl)-chromen-4-one (LY294002, CAS 154447-36-6); (S)—N1-(4-methyl-5-(2-(1,1,1-trifluoro-2-methylpropan-2-yl)pyridin-4-yl)thiazol-2-yl)pyrrolidine-1,2-dicarboxamide (also known as BYL719 or Alpelisib); 2-(4-(2-(1-isopropyl-3-methyl-1H-1,2,4-triazol-5-yl)-5,6-dihydrobenzo[f]imidazo[1,2-d][1,4]oxazepin-9-yl)-1H-pyrazol-1-yl)-2-methylpropanamide (also known as GDCO0032, RG7604, or Taselisib).

[0817] mTOR inhibitors include but are not limited to, Temsirolimus (Torisel®); Ridaforolimus (formally known as deferolimus, (1R,2R,4S)-4-[(2R)-2 [(1R,9S,12S,15R,16E,18R,19R,21R,23S,24E,26E,28Z,30S,32S,35R)-1,18-dihydroxy-19,30-dimethoxy-15,17,21,23,29,35-hexamethyl-2,3,10,14,20-pentaoxo-11,36-dioxa-4-azatricyclo[30.3.1.04,9] hexatriaconta-16,24,26,28-tetraen-12-yl]propyl]-2-methoxycyclohexyl dimethylphosphinate, also known as AP23573 and MK8669, and described in PCT Publication No. WO 03/064383); Everolimus (Afinitor® or RAD001); Rapamycin (AY22989, Sirolimus®); Simapimod (CAS 164301-51-3); (5-{2,4-Bis[(3S)-3-methylmorpholin-4-yl]pyrido[2,3-d]pyrimidin-7-yl}-2-methoxyphenyl)methanol (AZD8055); 2-Amino-8-[trans-4-(2-hydroxyethoxy)cyclohexyl]-6-(6-methoxy-3-pyridinyl)-4-methyl-pyrido[2,3-d]pyrimidin-7(8H)-one (PF04691502, CAS 1013101-36-4); and N²-[1,4-dioxo-4-[[4-(4-oxo-8-phenyl-4H-1-benzopyran-2-yl)morpholinium-4-yl]methoxy]butyl]-L-arginylglycyl-L-α-aspartylL-serine-(SEQ ID NO: 3201), inner salt (SF1126, CAS 936487-67-1).

[0818] CDK inhibitors include but are not limited to, Palbociclib (also known as PD-0332991, Ibrance®, 6-Acetyl-8-cyclopentyl-5-methyl-2-{[5-(1-piperazinyl)-2-pyridinyl]amino}pyrido[2,3-d]pyrimidin-7(8H)-one).

[0819] In yet another embodiment, the ZBTB32 inhibitor, or a pharmaceutically acceptable salt, hydrate, solvate, prodrug, stereoisomer, or tautomer thereof, of the present disclosure are used in combination with one or more pro-apoptotics, including but not limited to, IAP inhibitors, BCL2 inhibitors, MCL1 inhibitors, TRAIL agents, CHK inhibitors, for treating a disease, e.g., cancer.

[0820] For examples, IAP inhibitors include but are not limited to, LCL161, GDC-0917, AEG-35156, AT406, and TL32711. Other examples of IAP inhibitors include but are not limited to those disclosed in WO04/005284, WO 04/007529, WO05/097791, WO 05/069894, WO 05/069888, WO 05/094818, US2006/0014700, US2006/0025347, WO 06/069063, WO 06/010118, WO 06/017295, and WO08/134679, all of which are incorporated herein by reference.

[0821] BCL-2 inhibitors include but are not limited to, 4-[4-[[2-(4-Chlorophenyl)-5,5-dimethyl-1-cyclohexen-1-yl]methyl]-1-piperazinyl]-N-[[4-[[(1R)-3-(4-morpholinyl)-1-[(phenylthio)methyl]propyl]amino]-3-[(trifluoromethyl)sulfonyl]phenyl]sulfonyl]benzamide (also known as ABT-263 and described in PCT Publication No. WO 09/155386); Tetrocarcin A; Antimycin; Gossypol ((−)BL-193); Obatoclax; Ethyl-2-amino-6-cyclopentyl-4-(1-cyano-2-ethoxy-2-oxoethyl)-4Hchromone-3-carboxylate (HA14-1); Oblimersen (G3139, Genasense®); Bak BH3 peptide; (−)-Gossypol acetic acid (AT-101); 4-[4-[(4′-Chloro[1,1′-biphenyl]-2-yl)methyl]-1-piperazinyl]-N-[[4-[[(1R)-3-(dimethylamino)-1-[(phenylthio)methyl]propyl]amino]-3-nitrophenyl]sulfonyl]-benzamide (ABT-737, CAS 852808-04-9); and Navitoclax (ABT-263, CAS 923564-51-6).

[0822] Proapoptotic receptor agonists (PARAs) including DR4 (TRAILR1) and DR5 (TRAILR2), including but are not limited to, Dulanermin (AMG-951, RhApo2L/TRAIL); Mapatumumab (HRS-ETR1, CAS 658052-09-6); Lexatumumab (HGS-ETR2, CAS 845816-02-6); Apomab (Apomab®); Conatumumab (AMG655, CAS 896731-82-1); and Tigatuzumab(CS1008, CAS 946415-34-5, available from Daiichi Sankyo).

[0823] Checkpoint Kinase (CHK) inhibitors include but are not limited to, 7-Hydroxystaurosporine (UCN-01); 6-Bromo-3-(1-methyl-1H-pyrazol-4-yl)-5-(3R)-3-piperidinylpyrazolo[1,5-a]pyrimidin-7-amine (SCH900776, CAS 891494-63-6); 5-(3-Fluorophenyl)-3-ureidothiophene-2-carboxylic acid N—[(S)-piperidin-3-yl]amide (AZD7762, CAS 860352-01-8); 4-[((3S)-1-Azabicyclo[2.2.2]oct-3-yl)amino]-3-(1H-benzimidazol-2-yl)-6-chloroquinolin-2(1H)-one (CHIR 124, CAS 405168-58-3); 7-Aminodactinomycin (7-AAD), Isogranulatimide, debromohymenialdisine; N-[5-Bromo-4-methyl-2-[(2S)-2-morpholinylmethoxy]-phenyl]-N′-(5-methyl-2-pyrazinyl)urea (LY2603618, CAS 911222-45-2); Sulforaphane (CAS 4478-93-7, 4-Methylsulfinylbutyl isothiocyanate); 9,10,11,12-Tetrahydro-9,12-epoxy-1H-diindolo[1,2,3-fg:3′,2′,1′-kl]pyrrolo[3,4-i][1,6]benzodiazocine-1,3(2H)-dione (SB-218078, CAS 135897-06-2); and TAT-S216A (YGRKKRRQRRRLYRSPAMPENL (SEQ ID NO: 33)), and CBP501 ((d-Bpa)sws(d-Phe-F5)(d-Cha)rrrqrr).

[0824] In a further embodiment, the ZBTB32 inhibitor, or a pharmaceutically acceptable salt, hydrate, solvate, prodrug, stereoisomer, or tautomer thereof, of the present disclosure are used in combination with one or more immunomodulators (e.g., one or more of an activator of a costimulatory molecule or an inhibitor of an immune checkpoint molecule), for treating a disease, e.g., cancer.

[0825] In certain embodiments, the immunomodulator is an activator of a costimulatory molecule. In one embodiment, the agonist of the costimulatory molecule is selected from an agonist (e.g., an agonistic antibody or antigen-binding fragment thereof, or a soluble fusion) of OX40, CD2, CD27, CDS, ICAM-1, LFA-1 (CD11a/CD18), ICOS (CD278), 4-1BB (CD137), GITR, CD30, CD40, BAFFR, HVEM, CD7, LIGHT, NKG2C, SLAMF7, NKp80, CD160, B7-H3 or CD83 ligand.

### GITR Agonists

[0826] In some embodiments, a GITR agonist is used in combination with a ZBTB32 inhibitor, or a pharmaceutically acceptable salt, hydrate, solvate, prodrug, stereoisomer, or tautomer thereof, for treating a disease, e.g., cancer. In some embodiments, the GITR agonist is GWN323 (Novartis), BMS-986156, MK-4166 or MK-1248 (Merck), TRX518 (Leap Therapeutics), INCAGN1876 (Incyte/Agenus), AMG 228 (Amgen) or INBRX-110 (Inhibrx).

[0827] Exemplary GITR Agonists

[0828] In one embodiment, the GITR agonist is an anti-GITR antibody molecule. In one embodiment, the GITR agonist is an anti-GITR antibody molecule as described in WO 2016/057846, published on Apr. 14, 2016, entitled “Compositions and Methods of Use for Augmented Immune Response and Cancer Therapy,” incorporated by reference in its entirety.

[0829] In one embodiment, the anti-GITR antibody molecule comprises at least one, two, three, four, five or six complementarity determining regions (CDRs) (or collectively all of the CDRs) from a heavy and light chain variable region comprising an amino acid sequence shown in Table 12 (e.g., from the heavy and light chain variable region sequences of MAB7 disclosed in Table 12), or encoded by a nucleotide sequence shown in Table 12. In some embodiments, the CDRs are according to the Kabat definition (e.g., as set out in Table 12). In some embodiments, the CDRs are according to the Chothia definition (e.g., as set out in Table 12). In one embodiment, one or more of the CDRs (or collectively all of the CDRs) have one, two, three, four, five, six or more changes, e.g., amino acid substitutions (e.g., conservative amino acid substitutions) or deletions, relative to an amino acid sequence shown in Table 12, or encoded by a nucleotide sequence shown in Table 12.

[0830] In one embodiment, the anti-GITR antibody molecule comprises a heavy chain variable region (VH) comprising a VHCDR1 amino acid sequence of SEQ ID NO: 9, a VHCDR2 amino acid sequence of SEQ ID NO: 11, and a VHCDR3 amino acid sequence of SEQ ID NO: 13; and a light chain variable region (VL) comprising a VLCDR1 amino acid sequence of SEQ ID NO: 3016, a VLCDR2 amino acid sequence of SEQ ID NO: 16, and a VLCDR3 amino acid sequence of SEQ ID NO: 18, each disclosed in Table 12.

[0831] In one embodiment, the anti-GITR antibody molecule comprises a VH comprising the amino acid sequence of SEQ ID NO: 1, or an amino acid sequence at least 85%, 90%, 95%, or 99% identical or higher to SEQ ID NO: 1. In one embodiment, the anti-GITR antibody molecule comprises a VL comprising the amino acid sequence of SEQ ID NO: 2, or an amino acid sequence at least 85%, 90%, 95%, or 99% identical or higher to SEQ ID NO: 2. In one embodiment, the anti-GITR antibody molecule comprises a VH comprising the amino acid sequence of SEQ ID NO: 1 and a VL comprising the amino acid sequence of SEQ ID NO: 2.

[0832] In one embodiment, the antibody molecule comprises a VH encoded by the nucleotide sequence of SEQ ID NO: 5, or a nucleotide sequence at least 85%, 90%, 95%, or 99% identical or higher to SEQ ID NO: 5. In one embodiment, the antibody molecule comprises a VL encoded by the nucleotide sequence of SEQ ID NO: 6, or a nucleotide sequence at least 85%, 90%, 95%, or 99% identical or higher to SEQ ID NO: 6. In one embodiment, the antibody molecule comprises a VH encoded by the nucleotide sequence of SEQ ID NO: 5 and a VL encoded by the nucleotide sequence of SEQ ID NO: 6.

[0833] In one embodiment, the anti-GITR antibody molecule comprises a heavy chain comprising the amino acid sequence of SEQ ID NO: 3, or an amino acid sequence at least 85%, 90%, 95%, or 99% identical or higher to SEQ ID NO: 3. In one embodiment, the anti-GITR antibody molecule comprises a light chain comprising the amino acid sequence of SEQ ID NO: 4, or an amino acid sequence at least 85%, 90%, 95%, or 99% identical or higher to SEQ ID NO: 4. In one embodiment, the anti-GITR antibody molecule comprises a heavy chain comprising the amino acid sequence of SEQ ID NO: 3 and a light chain comprising the amino acid sequence of SEQ ID NO: 4.

[0834] In one embodiment, the antibody molecule comprises a heavy chain encoded by the nucleotide sequence of SEQ ID NO: 7, or a nucleotide sequence at least 85%, 90%, 95%, or 99% identical or higher to SEQ ID NO: 7. In one embodiment, the antibody molecule comprises a light chain encoded by the nucleotide sequence of SEQ ID NO: 8, or a nucleotide sequence at least 8500,9000,9500, or 99% identical or higher to SEQ ID NO 8 In one embodiment, the antibody molecule comprises a heavy chain encoded bythe nucleotide sequence ofSEQ IDNO: 7 and alight chain encoded bythe nucleotide sequence of SEQ ID NO: 8.

[0835] The antibody molecules described herein can be made by vectors, host cells, and methods described in WO 2016/057846, incorporated by reference in its entirety.

TABLE 12
Amino acid and nucleotide sequences of exemplary
anti-GITR antibody molecule

| MAB7 | | |
|---|---|---|
| SEQ ID NO: 1 | VH | EVQLVESGGGLVQSGGSLRLSCAASGFSLSSYGVDWVRQAPGKG |
| | | LEWVGVIWGGGGTYYASSLMGRFTISRDNSKNTLYLQMNSLRAE |
| | | DTAVYYCARHAYGHDGGFAMDYWGQGTLVTVSS |
| SEQ ID NO: 2 | VL | EIVMTQSPATLSVSPGERATLSCRASESVSSNVAWYQQRPGQAPR |
| | | LLIYGASNRATGIPARFSGSGSGTDFTLTISRLEPEDFAVYYCGQSY |
| | | SYPFTFGQGTKLEIK |
| SEQ ID NO: 3 | Heavy | EVQLVESGGGLVQSGGSLRLSCAASGFSLSSYGVDWVRQAPGKG |
| | Chain | LEWVGVIWGGGGTYYASSLMGRFTISRDNSKNTLYLQMNSLRAE |
| | | DTAVYYCARHAYGHDGGFAMDYWGQGTLVTVSSASTKGPSVFP |
| | | LAPSSKSTSGGTAALGCLVKDYFPEPVTVSWNSGALTSGVHTFPA |
| | | VLQSSGLYSLSSVVTVPSSSLGTQTYICNVNHKPSNTKVDKRVEP |
| | | KSCDKTHTCPPCPAPELLGGPSVFLFPPKPKDTLMISRTPEVTCVV |
| | | VDVSHEDPEVKFNWYVDGVEVHNAKTKPREEQYNSTYRVVSVL |
| | | TVLHQDWLNGKEYKCKVSNKALPAPIEKTISKAKGQPREPQVYT |
| | | LPPSREEMTKNQVSLTCLVKGFYPSDIAVEWESNGQPENNYKTTP |
| | | PVLDSDGSFFLYSKLTVDKSRWQQGNVFSCSVMHEALHNHYTQK |
| | | SLSLSPGK |
| SEQ ID NO: 4 | Light | EIVMTQSPATLSVSPGERATLSCRASESVSSNVAWYQQRPGQAPR |
| | Chain | LLIYGASNRATGIPARFSGSGSGTDFTLTISRLEPEDFAVYYCGQSY |
| | | SYPFTFGQGTKLEIKRTVAAPSVFIFPPSDEQLKSGTASVVCLLNNF |
| | | YPREAKVQWKVDNALQSGNSQESVTEQDSKDSTYSLSSTLTLSK |
| | | ADYEKHKVYACEVTHQGLSSPVTKSFNRGEC |
| SEQ ID NO: 5 | DNA | GAGGTGCAGCTGGTGGAATCTGGCGGCGGACTGGTGCAGTCCG |
| | VH | GCGGCTCTCTGAGACTGTCTTGCGCTGCCTCCGGCTTCTCCCTG |
| | | TCCTCTTACGGCGTGGACTGGGTGCGACAGGCCCCTGGCAAGG |
| | | GCCTGGAATGGGTGGGAGTGATCTGGGGCGGAGGCGGCACCT |
| | | ACTACGCCTCTTCCCTGATGGGCCGGTTCACCATCTCCCGGGAC |
| | | AACTCCAAGAACACCCTGTACCTGCAGATGAACTCCCTGCGGG |
| | | CCGAGGACACCGCCGTGTACTACTGCGCCAGACACGCCTACGG |
| | | CCACGACGGCGGCTTCGCCATGGATTATTGGGGCCAGGGCACC |
| | | CTGGTGACAGTGTCCTCC |
| SEQ ID NO: 6 | DNA | GAGATCGTGATGACCCAGTCCCCCGCCACCCTGTCTGTGTCTCC |
| | VL | CGGCGAGAGAGCCACCCTGAGCTGCAGAGCCTCCGAGTCCGTG |
| | | TCCTCCAACGTGGCCTGGTATCAGCAGAGACCTGGTCAGGCCC |
| | | CTCGGCTGCTGATCTACGGCGCCTCTAACCGGGCCACCGGCAT |
| | | CCCTGCCAGATTCTCCGGCTCCGGCAGCGGCACCGACTTCACC |
| | | CTGACCATCTCCCGGCTGGAACCCGAGGACTTCGCCGTGTACT |
| | | ACTGCGGCCAGTCCTACTCATACCCCTTCACCTTCGGCCAGGG |
| | | CACCAAGCTGGAAATCAAG |
| SEQ ID NO: 7 | DNA | GAGGTGCAGCTGGTGGAATCTGGCGGCGGACTGGTGCAGTCCG |
| | Heavy | GCGGCTCTCTGAGACTGTCTTGCGCTGCCTCCGGCTTCTCCCTG |
| | Chain | TCCTCTTACGGCGTGGACTGGGTGCGACAGGCCCCTGGCAAGG |
| | | GCCTGGAATGGGTGGGAGTGATCTGGGGCGGAGGCGGCACCT |
| | | ACTACGCCTCTTCCCTGATGGGCCGGTTCACCATCTCCCGGGAC |
| | | AACTCCAAGAACACCCTGTACCTGCAGATGAACTCCCTGCGGG |
| | | CCGAGGACACCGCCGTGTACTACTGCGCCAGACACGCCTACGG |
| | | CCACGACGGCGGCTTCGCCATGGATTATTGGGGCCAGGGCACC |
| | | CTGGTGACAGTGTCCTCCGCTAGCACCAAGGGCCCAAGTGTGT |
| | | TTCCCCTGGCCCCCAGCAGCAAGTCTACTTCCGGCGGAACTGC |
| | | TGCCCTGGGTTGCCTGGTGAAGGACTACTTCCCCGAGCCCGTG |
| | | ACAGTGTCCTGGAACTCTGGGGCTCTGACTTCCGGCGTGCACA |
| | | CCTTCCCCGCCGTGCTGCAGAGCAGCGGCCTGTACAGCCTGAG |
| | | CAGCGTGGTGACAGTGCCCTCCAGCTCTCTGGGAACCCAGACC |
| | | TATATCTGCAACGTGAACCACAAGCCCAGCAACACCAAGGTGG |
| | | ACAAGAGAGTGGAGCCCAAGAGCTGCGACAAGACCCACACCT |
| | | GCCCCCCCTGCCCAGCTCCAGAACTGCTGGGAGGGCCTTCCGT |
| | | GTTCCTGTTCCCCCCCAAGCCCAAGGACACCCTGATGATCAGC |
| | | AGGACCCCCGAGGTGACCTGCGTGGTGGTGGACGTGTCCCACG |
| | | AGGACCCAGAGGTGAAGTTCAACTGGTACGTGGACGGCGTGG |
| | | AGGTGCACAACGCCAAGACCAAGCCCAGAGAGGAGCAGTACA |
| | | ACAGCACCTACAGGGTGGTGTCCGTGCTGACCGTGCTGCACCA |
| | | GGACTGGCTGAACGGCAAAGAATACAAGTGCAAAGTCTCCAA |
| | | CAAGGCCCTGCCAGCCCCAATCGAAAAGACAATCAGCAAGGC |
| | | CAAGGGCCAGCCACGGGAGCCCCAGGTGTACACCCTGCCCCCC |
| | | AGCCGGGAGGAGATGACCAAGAACCAGGTGTCCCTGACCTGT |
| | | CTGGTGAAGGGCTTCTACCCCAGCGATATCGCCGTGGAGTGGG |
| | | AGAGCAACGGCCAGCCCGAGAACAACTACAAGACCACCCCCC |
| | | CAGTGCTGGACAGCGACGGCAGCTTCTTCCTGTACAGCAAGCT |
| | | GACCGTGGACAAGTCCAGGTGGCAGCAGGGCAACGTGTTCAG |
| | | CTGCAGCGTGATGCACGAGGCCCTGCACAACCACTACACCCAG |
| | | AAGTCCCTGAGCCTGAGCCCCGGCAAG |
| SEQ ID NO: 8 | DNA | GAGATCGTGATGACCCAGTCCCCCGCCACCCTGTCTGTGTCTCC |
| | Light | CGGCGAGAGAGCCACCCTGAGCTGCAGAGCCTCCGAGTCCGTG |
| | Chain | TCCTCCAACGTGGCCTGGTATCAGCAGAGACCTGGTCAGGCCC |
| | | CTCGGCTGCTGATCTACGGCGCCTCTAACCGGGCCACCGGCAT |
| | | CCCTGCCAGATTCTCCGGCTCCGGCAGCGGCACCGACTTCACC |
| | | CTGACCATCTCCCGGCTGGAACCCGAGGACTTCGCCGTGTACT |
| | | ACTGCGGCCAGTCCTACTCATACCCCTTCACCTTCGGCCAGGG |
| | | CACCAAGCTGGAAATCAAGCGTACGGTGGCCGCTCCCAGCGTG |
| | | TTCATCTTCCCCCCCAGCGACGAGCAGCTGAAGAGCGGCACCG |
| | | CCAGCGTGGTGTGCCTGCTGAACAACTTCTACCCCCGGGAGGC |
| | | CAAGGTGCAGTGGAAGGTGGACAACGCCCTGCAGAGCGGCAA |
| | | CAGCCAGGAGAGCGTCACCGAGCAGGACAGCAAGGACTCCAC |
| | | CTACAGCCTGAGCAGCACCCTGACCCTGAGCAAGGCCGACTAC |
| | | GAGAAGCATAAGGTGTACGCCTGCGAGGTGACCCACCAGGGC |
| | | CTGTCCAGCCCCGTGACCAAGAGCTTCAACAGGGGCGAGTGC |
| SEQ ID NO: | HCDR1 | SYGVD |
| 9 (KABAT) | | |
| SEQ ID NO: | HCDR1 | GFSLSSY |
| 10 (CHOTHIA) | | |
| SEQ ID NO: 11 | HCDR2 | VIWGGGGTYYASSLMG |
| (KABAT) | | |
| SEQ ID NO: 12 | HCDR2 | WGGGG |
| (CHOTHIA) | | |
| SEQ ID NO: | HCDR3 | HAYGHDGGFAMDY |
| 3015 (KABAT) | | |
| SEQ ID NO: | HCDR3 | HAYGHDGGFAMDY |
| 3015 (CHOTHIA) | | |
| SEQ ID NO: | LCDR1 | RASESVSSNVA |
| 3016 (KABAT) | | |
| SEQ ID NO: | LCDR1 | SESVSSN |
| 3017 (CHOTHIA) | | |
| SEQ ID NO: 16 | LCDR2 | GASNRAT |
| (KABAT) | | |
| SEQ ID NO: 17 | LCDR2 | GAS |
| (CHOTHIA) | | |
| SEQ ID NO: | LCDR3 | GQSYSYPFT |
| 18 (KABAT) | | |
| SEQ ID NO: 19 | LCDR3 | SYSYPF |
| (CHOTHIA) | | |

[0836] Other Exemplary GITR Agonists

[0837] In one embodiment, the anti-GITR antibody molecule is BMS-986156 (Bristol-Myers Squibb), also known as BMS 986156 or BMS986156. BMS-986156 and other anti-GITR antibodies are disclosed, e.g., in U.S. Pat. No. 9,228,016 and WO 2016/196792, incorporated by reference in their entirety. In one embodiment, the anti-GITR antibody molecule comprises one or more of the CDR sequences (or collectively all of the CDR sequences), the heavy chain or light chain variable region sequence, or the heavy chain or light chain sequence of BMS-986156, e.g., as disclosed in Table 13.

[0838] In one embodiment, the anti-GITR antibody molecule is MK-4166 or MK-1248 (Merck). MK-4166, MK-1248, and other anti-GITR antibodies are disclosed, e.g., in U.S. Pat. No. 8,709,424, WO 2011/028683, WO 2015/026684, and Mahne et al. Cancer Res. 2017; 77(5):1108-1118, incorporated by reference in their entirety. In one embodiment, the anti-GITR antibody molecule comprises one or more of the CDR sequences (or collectively all of the CDR sequences), the heavy chain or light chain variable region sequence, or the heavy chain or light chain sequence of MK-4166 or MK-1248.

[0839] In one embodiment, the anti-GITR antibody molecule is TRX518 (Leap Therapeutics). TRX518 and other anti-GITR antibodies are disclosed, e.g., in U.S. Pat. Nos. 7,812,135, 8,388,967, 9,028,823, WO 2006/105021, and Ponte J et al. (2010) Clinical Immunology; 135:S96, incorporated by reference in their entirety. In one embodiment, the anti-GITR antibody molecule comprises one or more of the CDR sequences (or collectively all of the CDR sequences), the heavy chain or light chain variable region sequence, or the heavy chain or light chain sequence of TRX518.

[0840] In one embodiment, the anti-GITR antibody molecule is INCAGN1876 (Incyte/Agenus). INCAGN1876 and other anti-GITR antibodies are disclosed, e.g., in US 2015/0368349 and WO 2015/184099, incorporated by reference in their entirety. In one embodiment, the anti-GITR antibody molecule comprises one or more of the CDR sequences (or collectively all of the CDR sequences), the heavy chain or light chain variable region sequence, or the heavy chain or light chain sequence of INCAGN1876.

[0841] In one embodiment, the anti-GITR antibody molecule is AMG 228 (Amgen). AMG 228 and other anti-GITR antibodies are disclosed, e.g., in U.S. Pat. No. 9,464,139 and WO 2015/031667, incorporated by reference in their entirety. In one embodiment, the anti-GITR antibody molecule comprises one or more of the CDR sequences (or collectively all of the CDR sequences), the heavy chain or light chain variable region sequence, or the heavy chain or light chain sequence of AMG 228.

[0842] In one embodiment, the anti-GITR antibody molecule is INBRX-110 (Inhibrx). INBRX-110 and other anti-GITR antibodies are disclosed, e.g., in US 2017/0022284 and WO 2017/015623, incorporated by reference in their entirety. In one embodiment, the GITR agonist comprises one or more of the CDR sequences (or collectively all of the CDR sequences), the heavy chain or light chain variable region sequence, or the heavy chain or light chain sequence of INBRX-110.

[0843] In one embodiment, the GITR agonist (e.g., a fusion protein) is MEDI 1873 (MedImmune), also known as MEDI1873. MEDI 1873 and other GITR agonists are disclosed, e.g., in US 2017/0073386, WO 2017/025610, and Ross et al. Cancer Res 2016; 76(14 Suppl): Abstract nr 561, incorporated by reference in their entirety. In one embodiment, the GITR agonist comprises one or more of an IgG Fc domain, a functional multimerization domain, and a receptor binding domain of a glucocorticoid-induced TNF receptor ligand (GITRL) of MEDI 1873.

[0844] Further known GITR agonists (e.g., anti-GITR antibodies) include those described, e.g., in WO 2016/054638, incorporated by reference in its entirety.

[0845] In one embodiment, the anti-GITR antibody is an antibody that competes for binding with, and/or binds to the same epitope on GITR as, one of the anti-GITR antibodies described herein.

[0846] In one embodiment, the GITR agonist is a peptide that activates the GITR signalling pathway. In one embodiment, the GITR agonist is an immunoadhesin binding fragment (e.g., an immunoadhesin binding fragment comprising an extracellular or GITR binding portion of GITRL) fused to a constant region (e.g., an Fc region of an immunoglobulin sequence).

TABLE 13
Amino acid sequence of other exemplary anti-GITR antibody molecules

| BMS-986156 | | |
|---|---|---|
| SEQ ID NO: 20 | VH | QVQLVESGGGVVQPGRSLRLSCAASGFTFSSYGMHWVRQAPGKG |
| | | LEWVAVIWYEGSNKYYADSVKGRFTISRDNSKNTLYLQMNSLRAE |
| | | DTAVYYCARGGSMVRGDYYYGMDVWGQGTTVTVSS |
| SEQ ID NO: 21 | VL | AIQLTQSPSSLSASVGDRVTITCRASQGISSALAWYQQKPGKAPKLL |
| | | IYDASSLESGVPSRFSGSGSGTDFTLTISSLQPEDFATYYCQQFNSYP |
| | | YTFGQGTKLEIK |

[0847] In certain embodiments, the immunomodulator is an inhibitor of an immune checkpoint molecule. In one embodiment, the immunomodulator is an inhibitor of PD-1, PD-L1, PD-L2, CTLA4, TIM3, LAG3, VISTA, BTLA, TIGIT, LAIR1, CD160, 2B4 and/or TGFRbeta. In one embodiment, the inhibitor of an immune checkpoint molecule inhibits PD-1, PD-L1, LAG-3, TIM-3 or CTLA4, or any combination thereof. The term “inhibition” or “inhibitor” includes a reduction in a certain parameter, e.g., an activity, of a given molecule, e.g., an immune checkpoint inhibitor. For example, inhibition of an activity, e.g., a PD-1 or PD-L1 activity, of at least 5%, 10%, 20%, 30%, 40%, 50% or more is included by this term. Thus, inhibition need not be 100%.

[0848] Inhibition of an inhibitory molecule can be performed at the DNA, RNA or protein level. In some embodiments, an inhibitory nucleic acid (e.g., a dsRNA, siRNA or shRNA), can be used to inhibit expression of an inhibitory molecule. In other embodiments, the inhibitor of an inhibitory signal is a polypeptide e.g., a soluble ligand (e.g., PD-1-Ig or CTLA-4 Ig), or an antibody or antigen-binding fragment thereof, that binds to the inhibitory molecule; e.g., an antibody or fragment thereof (also referred to herein as “an antibody molecule”) that binds to PD-1, PD-L1, PD-L2, CTLA4, TIM3, LAG3, VISTA, BTLA, TIGIT, LAIR1, CD160, 2B4 and/or TGFR beta, or a combination thereof.

[0849] In one embodiment, the antibody molecule is a full antibody or fragment thereof (e.g., a Fab, F(ab′)₂, Fv, or a single chain Fv fragment (scFv)). In yet other embodiments, the antibody molecule has a heavy chain constant region (Fc) selected from, e.g., the heavy chain constant regions of IgG1, IgG2, IgG3, IgG4, IgM, IgA1, IgA2, IgD, and IgE; particularly, selected from, e.g., the heavy chain constant regions of IgG1, IgG2, IgG3, and IgG4, more particularly, the heavy chain constant region of IgG1 or IgG4 (e.g., human IgG1 or IgG4). In one embodiment, the heavy chain constant region is human IgG1 or human IgG4. In one embodiment, the constant region is altered, e.g., mutated, to modify the properties of the antibody molecule (e.g., to increase or decrease one or more of Fc receptor binding, antibody glycosylation, the number of cysteine residues, effector cell function, or complement function).

[0850] In certain embodiments, the antibody molecule is in the form of a bispecific or multispecific antibody molecule. In one embodiment, the bispecific antibody molecule has a first binding specificity to PD-1 or PD-L1 and a second binding specificity, e.g., a second binding specificity to TIM-3, LAG-3, or PD-L2. In one embodiment, the bispecific antibody molecule binds to PD-1 or PD-L1 and TIM-3. In another embodiment, the bispecific antibody molecule binds to PD-1 or PD-L1 and LAG-3. In another embodiment, the bispecific antibody molecule binds to PD-1 and PD-L1. In yet another embodiment, the bispecific antibody molecule binds to PD-1 and PD-L2. In another embodiment, the bispecific antibody molecule binds to TIM-3 and LAG-3. Any combination of the aforesaid molecules can be made in a multispecific antibody molecule, e.g., a trispecific antibody that includes a first binding specificity to PD-1 or PD-1, and a second and third binding specificities to two or more of TIM-3, LAG-3, or PD-L2.

[0851] In certain embodiments, the immunomodulator is an inhibitor of PD-1, e.g., human PD-1. In another embodiment, the immunomodulator is an inhibitor of PD-L1, e.g., human PD-L1. In one embodiment, the inhibitor of PD-1 or PD-L1 is an antibody molecule to PD-1 or PD-L1. The PD-1 or PD-L1 inhibitor can be administered alone, or in combination with other immunomodulators, e.g., in combination with an inhibitor of LAG-3, TIM-3 or CTLA4. In an exemplary embodiment, the inhibitor of PD-1 or PD-L1, e.g., the anti-PD-1 or PD-L1 antibody molecule, is administered in combination with a LAG-3 inhibitor, e.g., an anti-LAG-3 antibody molecule. In another embodiment, the inhibitor of PD-1 or PD-L1, e.g., the anti-PD-1 or PD-L1 antibody molecule, is administered in combination with a TIM-3 inhibitor, e.g., an anti-TIM-3 antibody molecule. In yet other embodiments, the inhibitor of PD-1 or PD-L1, e.g., the anti-PD-1 antibody molecule, is administered in combination with a LAG-3 inhibitor, e.g., an anti-LAG-3 antibody molecule, and a TIM-3 inhibitor, e.g., an anti-TIM-3 antibody molecule.

[0852] Other combinations of immunomodulators with a PD-1 inhibitor (e.g., one or more of PD-L2, CTLA4, TIM3, LAG3, VISTA, BTLA, TIGIT, LAIR1, CD160, 2B4 and/or TGFR) are also within the present disclosure. Any of the antibody molecules known in the art or disclosed herein can be used in the aforesaid combinations of inhibitors of checkpoint molecule.

### CTLA-4 Inhibitors

[0853] In some embodiments, the ZBTB32 inhibitor, or a pharmaceutically acceptable salt, hydrate, solvate, prodrug, stereoisomer, or tautomer thereof, of the present disclosure are used in combination with a CTLA-4 inhibitor to treat a disease, e.g., cancer. In some embodiments, the PD-1 inhibitor is selected from Ipilimumab (MDX-010, MDX-101, or Yervoy, Bristol-Myers Squibb), tremelilumab (ticilimumab. Pfizer/AstraZeneca), AGEN1181 (Agenus), Zalifrelimab (AGEN1884, Agenus), IBI310 (Innovent Biologics).

### PD-1 Inhibitors

[0854] In some embodiments, the ZBTB32 inhibitor, or a pharmaceutically acceptable salt, hydrate, solvate, prodrug, stereoisomer, or tautomer thereof, of the present disclosure are used in combination with a PD-1 inhibitor to treat a disease, e.g., cancer. In some embodiments, the PD-1 inhibitor is selected from PDR001 (Novartis), Nivolumab (Bristol-Myers Squibb), Pembrolizumab (Merck & Co), Pidilizumab (CureTech), MEDI0680 (Medimmune), Cemiplimab (REGN2810, Regeneron), Dostarlimab (TSR-042, Tesaro), PF-06801591 (Pfizer), Tislelizumab (BGB-A317, Beigene), BGB-108 (Beigene), INCSHR1210 (Incyte), Balstilimab (AGEN2035, Agenus), Sintilimab (InnoVent), Toripalimab (Shanghai Junshi Bioscience), Camrelizumab (Jiangsu Hengrui Medicine Co.), or AMP-224 (Amplimmune).

[0855] Exemplary PD-1 Inhibitors

[0856] In one embodiment, the PD-1 inhibitor is an anti-PD-1 antibody molecule. In one embodiment, the PD-1 inhibitor is an anti-PD-1 antibody molecule as described in US 2015/0210769, published on Jul. 30, 2015, entitled “Antibody Molecules to PD-1 and Uses Thereof,” incorporated by reference in its entirety.

[0857] In one embodiment, the anti-PD-1 antibody molecule comprises at least one, two, three, four, five or six complementarity determining regions (CDRs) (or collectively all of the CDRs) from a heavy and light chain variable region comprising an amino acid sequence shown in Table 14 (e.g., from the heavy and light chain variable region sequences of BAP049-Clone-E or BAP049-Clone-B disclosed in Table 14), or encoded by a nucleotide sequence shown in Table 14. In some embodiments, the CDRs are according to the Kabat definition (e.g., as set out in Table 14). In some embodiments, the CDRs are according to the Chothia definition (e.g., as set out in Table 14). In some embodiments, the CDRs are according to the combined CDR definitions of both Kabat and Chothia (e.g., as set out in Table 14). In one embodiment, the combination of Kabat and Chothia CDR of VH CDR1 comprises the amino acid sequence GYTFTTYWMH (SEQ ID NO: 3198). In one embodiment, one or more of the CDRs (or collectively all of the CDRs) have one, two, three, four, five, six or more changes, e.g., amino acid substitutions (e.g., conservative amino acid substitutions) or deletions, relative to an amino acid sequence shown in Table 14, or encoded by a nucleotide sequence shown in Table 14.

[0858] In one embodiment, the anti-PD-1 antibody molecule comprises a heavy chain variable region (VH) comprising a VHCDR1 amino acid sequence of SEQ ID NO: 22, a VHCDR2 amino acid sequence of SEQ ID NO: 3018, and a VHCDR3 amino acid sequence of SEQ ID NO: 3019; and a light chain variable region (VL) comprising a VLCDR1 amino acid sequence of SEQ ID NO: 31, a VLCDR2 amino acid sequence of SEQ ID NO: 32, and a VLCDR3 amino acid sequence of SEQ ID NO: 286, each disclosed in Table 14.

[0859] In one embodiment, the antibody molecule comprises a VH comprising a VHCDR1 encoded by the nucleotide sequence of SEQ ID NO: 3031, a VHCDR2 encoded by the nucleotide sequence of SEQ ID NO: 3032, and a VHCDR3 encoded by the nucleotide sequence of SEQ ID NO: 3033; and a VL comprising a VLCDR1 encoded by the nucleotide sequence of SEQ ID NO: 3036, a VLCDR2 encoded by the nucleotide sequence of SEQ ID NO: 3037, and a VLCDR3 encoded by the nucleotide sequence of SEQ ID NO: 3038, each disclosed in Table 14.

[0860] In one embodiment, the anti-PD-1 antibody molecule comprises a VH comprising the amino acid sequence of SEQ ID NO: 27, or an amino acid sequence at least 85%, 90%, 95%, or 99% identical or higher to SEQ ID NO: 27. In one embodiment, the anti-PD-1 antibody molecule comprises a VL comprising the amino acid sequence of SEQ ID NO: 3024, or an amino acid sequence at least 85%, 90%, 95%, or 99% identical or higherto SEQ ID NO: 3024. In one embodiment, the anti-PD-1 antibody molecule comprises a VL comprising the amino acid sequence of SEQ ID NO: 37, or an amino acid sequence at least 85%, 90%, 95%, or 99% identical or higher to SEQ ID NO: 37. In one embodiment, the anti-PD-1 antibody molecule comprises a VH comprising the amino acid sequence of SEQ ID NO: 27 and a VL comprising the amino acid sequence of SEQ ID NO: 3024. In one embodiment, the anti-PD-1 antibody molecule comprises a VH comprising the amino acid sequence of SEQ ID NO: 27 and a VL comprising the amino acid sequence of SEQ ID NO: 37.

[0861] In one embodiment, the antibody molecule comprises a VH encoded by the nucleotide sequence of SEQ ID NO: 28, or a nucleotide sequence at least 85%, 90%, 95%, or 99% identical or higher to SEQ ID NO: 28. In one embodiment, the antibody molecule comprises a VL encoded by the nucleotide sequence of SEQ ID NO: 3027 or 38, or a nucleotide sequence at least 85%, 90%, 95%, or 99% identical or higher to SEQ ID NO: 3027 or 38. In one embodiment, the antibody molecule comprises a VH encoded by the nucleotide sequence of SEQ ID NO: 28 and a VL encoded by the nucleotide sequence of SEQ ID NO: 3027 or 38.

[0862] In one embodiment, the anti-PD-1 antibody molecule comprises a heavy chain comprising the amino acid sequence of SEQ ID NO: 29, or an amino acid sequence at least 85%, 90%, 95%, or 99% identical or higher to SEQ ID NO: 29. In one embodiment, the anti-PD-1 antibody molecule comprises a light chain comprising the amino acid sequence of SEQ ID NO: 3029, or an amino acid sequence at least 85%, 90%, 95%, or 99% identical or higher to SEQ ID NO: 3029. In one embodiment, the anti-PD-1 antibody molecule comprises a light chain comprising the amino acid sequence of SEQ ID NO: 39, or an amino acid sequence at least 85%, 90%, 95%, or 99% identical or higher to SEQ ID NO: 39. In one embodiment, the anti-PD-1 antibody molecule comprises a heavy chain comprising the amino acid sequence of SEQ ID NO: 29 and a light chain comprising the amino acid sequence of SEQ ID NO: 3029. In one embodiment, the anti-PD-1 antibody molecule comprises a heavy chain comprising the amino acid sequence of SEQ ID NO: 29 and a light chain comprising the amino acid sequence of SEQ ID NO: 39.

[0863] In one embodiment, the antibody molecule comprises a heavy chain encoded by the nucleotide sequence of SEQ ID NO: 30, or a nucleotide sequence at least 85%, 90%, 95%, or 99% identical or higher to SEQ ID NO: 30. In one embodiment, the antibody molecule comprises a light chain encoded by the nucleotide sequence of SEQ ID NO: 3030 or 3023, or a nucleotide sequence at least 85%, 90%, 95%, or 99% identical or higher to SEQ ID NO: 3030 or 3023. In one embodiment, the antibody molecule comprises a heavy chain encoded by the nucleotide sequence of SEQ ID NO: 30 and a light chain encoded by the nucleotide sequence of SEQ ID NO: 3030 or 3023.

[0864] The antibody molecules described herein can be made by vectors, host cells, and methods described in US 2015/0210769, incorporated by reference in its entirety.

TABLE 14
Amino acid and nucleotide sequences of exemplary
anti-PD-1 antibody molecules

| | | |
|---|---|---|
| BAP049-Clone-B HC | | |
| SEQ ID NO: 22 | HCDR1 | TYWMH |
| (Kabat) | | |
| SEQ ID NO: | HCDR2 | NIYPGTGGSNFDEKFKN |
| 3018(Kabat) | | |
| SEQ ID NO: 3019 | HCDR3 | WTTGTGAY |
| (Kabat) | | |
| SEQ ID NO: 3020 | HCDR1 | GYTFTTY |
| (Chothia) | | |
| SEQ ID NO: 3021 | HCDR2 | YPGTGG |
| (Chothia) | | |
| SEQ ID NO: 3019 | HCDR3 | WTTGTGAY |
| (Chothia) | | |
| SEQ ID NO: 27 | VH | EVQLVQSGAEVKKPGESLRISCKGSGYTFTTYWMHWVRQAT |
| | | GQGLEWMGNIYPGTGGSNFDEKFKNRVTITADKSTSTAYME |
| | | LSSLRSEDTAVYYCTRWTTGTGAYWGQGTTVTVSS |
| SEQ ID NO: 28 | DNA | GAGGTGCAGCTGGTGCAGTCAGGCGCCGAAGTGAAGAAG |
| | VH | CCCGGCGAGTCACTGAGAATTAGCTGTAAAGGTTCAGGCT |
| | | ACACCTTCACTACCTACTGGATGCACTGGGTCCGCCAGGC |
| | | TACCGGTCAAGGCCTCGAGTGGATGGGTAATATCTACCCC |
| | | GGCACCGGCGGCTCTAACTTCGACGAGAAGTTTAAGAATA |
| | | GAGTGACTATCACCGCCGATAAGTCTACTAGCACCGCCTA |
| | | TATGGAACTGTCTAGCCTGAGATCAGAGGACACCGCCGTC |
| | | TACTACTGCACTAGGTGGACTACCGGCACAGGCGCCTACT |
| | | GGGGTCAAGGCACTACCGTGACCGTGTCTAGC |
| SEQ ID NO: 29 | Heavy | EVQLVQSGAEVKKPGESLRISCKGSGYTFTTYWMHWVRQAT |
| | chain | GQGLEWMGNIYPGTGGSNFDEKFKNRVTITADKSTSTAYME |
| | | LSSLRSEDTAVYYCTRWTTGTGAYWGQGTTVTVSSASTKGP |
| | | SVFPLAPCSRSTSESTAALGCLVKDYFPEPVTVSWNSGALTSG |
| | | VHTFPAVLQSSGLYSLSSVVTVPSSSLGTKTYTCNVDHKPSNT |
| | | KVDKRVESKYGPPCPPCPAPEFLGGPSVFLFPPKPKDTLMISR |
| | | TPEVTCVVVDVSQEDPEVQFNWYVDGVEVHNAKTKPREEQF |
| | | NSTYRVVSVLTVLHQDWLNGKEYKCKVSNKGLPSSIEKTISK |
| | | AKGQPREPQVYTLPPSQEEMTKNQVSLTCLVKGFYPSDIAVE |
| | | WESNGQPENNYKTTPPVLDSDGSFFLYSRLTVDKSRWQEGN |
| | | VFSCSVMHEALHNHYTQKSLSLSLG |
| SEQ ID NO: 30 | DNA | GAGGTGCAGCTGGTGCAGTCAGGCGCCGAAGTGAAGAAG |
| | heavy | CCCGGCGAGTCACTGAGAATTAGCTGTAAAGGTTCAGGCT |
| | chain | ACACCTTCACTACCTACTGGATGCACTGGGTCCGCCAGGC |
| | | TACCGGTCAAGGCCTCGAGTGGATGGGTAATATCTACCCC |
| | | GGCACCGGCGGCTCTAACTTCGACGAGAAGTTTAAGAATA |
| | | GAGTGACTATCACCGCCGATAAGTCTACTAGCACCGCCTA |
| | | TATGGAACTGTCTAGCCTGAGATCAGAGGACACCGCCGTC |
| | | TACTACTGCACTAGGTGGACTACCGGCACAGGCGCCTACT |
| | | GGGGTCAAGGCACTACCGTGACCGTGTCTAGCGCTAGCAC |
| | | TAAGGGCCCGTCCGTGTTCCCCCTGGCACCTTGTAGCCGG |
| | | AGCACTAGCGAATCCACCGCTGCCCTCGGCTGCCTGGTCA |
| | | AGGATTACTTCCCGGAGCCCGTGACCGTGTCCTGGAACAG |
| | | CGGAGCCCTGACCTCCGGAGTGCACACCTTCCCCGCTGTG |
| | | CTGCAGAGCTCCGGGCTGTACTCGCTGTCGTCGGTGGTCA |
| | | CGGTGCCTTCATCTAGCCTGGGTACCAAGACCTACACTTGC |
| | | AACGTGGACCACAAGCCTTCCAACACTAAGGTGGACAAGC |
| | | GCGTCGAATCGAAGTACGGCCCACCGTGCCCGCCTTGTCC |
| | | CGCGCCGGAGTTCCTCGGCGGTCCCTCGGTCTTTCTGTTCC |
| | | CACCGAAGCCCAAGGACACTTTGATGATTTCCCGCACCCC |
| | | TGAAGTGACATGCGTGGTCGTGGACGTGTCACAGGAAGAT |
| | | CCGGAGGTGCAGTTCAATTGGTACGTGGATGGCGTCGAGG |
| | | TGCACAACGCCAAAACCAAGCCGAGGGAGGAGCAGTTCA |
| | | ACTCCACTTACCGCGTCGTGTCCGTGCTGACGGTGCTGCAT |
| | | CAGGACTGGCTGAACGGGAAGGAGTACAAGTGCAAAGTG |
| | | TCCAACAAGGGACTTCCTAGCTCAATCGAAAAGACCATCT |
| | | CGAAAGCCAAGGGACAGCCCCGGGAACCCCAAGTGTATA |
| | | CCCTGCCACCGAGCCAGGAAGAAATGACTAAGAACCAAG |
| | | TCTCATTGACTTGCCTTGTGAAGGGCTTCTACCCATCGGAT |
| | | ATCGCCGTGGAATGGGAGTCCAACGGCCAGCCGGAAAAC |
| | | AACTACAAGACCACCCCTCCGGTGCTGGACTCAGACGGAT |
| | | CCTTCTTCCTCTACTCGCGGCTGACCGTGGATAAGAGCAG |
| | | ATGGCAGGAGGGAAATGTGTTCAGCTGTTCTGTGATGCAT |
| | | GAAGCCCTGCACAACCACTACACTCAGAAGTCCCTGTCCC |
| | | TCTCCCTGGGA |
| BAP049-Clone-B LC | | |
| SEQ ID NO: 31 | LCDR1 | KSSQSLLDSGNQKNFLT |
| (Kabat) | | |
| SEQ ID NO: 32 | LCDR2 | WASTRES |
| (Kabat) | | |
| SEQ ID NO: | LCDR3 | QNDYSYPYT |
| 286(Kabat) | | |
| SEQ ID NO: 34 | LCDR1 | SQSLLDSGNQKNF |
| (Chothia) | | |
| SEQ ID NO: 35 | LCDR2 | WAS |
| (Chothia) | | |
| SEQ ID NO: 36 | LCDR3 | DYSYPY |
| (Chothia) | | |
| SEQ ID NO: 37 | VL | EIVLTQSPATLSLSPGERATLSCKSSQSLLDSGNQKNFLTWYQ |
| | | QKPGKAPKLLIYWASTRESGVPSRFSGSGSGTDFTFTISSLQPE |
| | | DIATYYCQNDYSYPYTFGQGTKVEIK |
| SEQ ID NO: 38 | DNA | GAGATCGTCCTGACTCAGTCACCCGCTACCCTGAGCCTGA |
| | VL | GCCCTGGCGAGCGGGCTACACTGAGCTGTAAATCTAGTCA |
| | | GTCACTGCTGGATAGCGGTAATCAGAAGAACTTCCTGACC |
| | | TGGTATCAGCAGAAGCCCGGTAAAGCCCCTAAGCTGCTGA |
| | | TCTACTGGGCCTCTACTAGAGAATCAGGCGTGCCCTCTAG |
| | | GTTTAGCGGTAGCGGTAGTGGCACCGACTTCACCTTCACT |
| | | ATCTCTAGCCTGCAGCCCGAGGATATCGCTACCTACTACTG |
| | | TCAGAACGACTATAGCTACCCCTACACCTTCGGTCAAGGC |
| | | ACTAAGGTCGAGATTAAG |
| SEQ ID NO: 3228 | Light | EIVLTQSPATLSLSPGERATLSCKSSQSLLDSGNQKNFLTWYQ |
| | chain | QKPGKAPKLLIYWASTRESGVPSRFSGSGSGTDFTFTISSLQPE |
| | | DIATYYCQNDYSYPYTFGQGTKVEIKRTVAAPSVFIFPPSDEQ |
| | | LKSGTASVVCLLNNFYPREAKVQWKVDNALQSGNSQESVTE |
| | | QDSKDSTYSLSSTLTLSKADYEKHKVYACEVTHQGLSSPVTK |
| | | SFNRGEC |
| SEQ ID NO: 3023 | DNA | GAGATCGTCCTGACTCAGTCACCCGCTACCCTGAGCCTGA |
| | light | GCCCTGGCGAGCGGGCTACACTGAGCTGTAAATCTAGTCA |
| | chain | GTCACTGCTGGATAGCGGTAATCAGAAGAACTTCCTGACC |
| | | TGGTATCAGCAGAAGCCCGGTAAAGCCCCTAAGCTGCTGA |
| | | TCTACTGGGCCTCTACTAGAGAATCAGGCGTGCCCTCTAG |
| | | GTTTAGCGGTAGCGGTAGTGGCACCGACTTCACCTTCACT |
| | | ATCTCTAGCCTGCAGCCCGAGGATATCGCTACCTACTACTG |
| | | TCAGAACGACTATAGCTACCCCTACACCTTCGGTCAAGGC |
| | | ACTAAGGTCGAGATTAAGCGTACGGTGGCCGCTCCCAGCG |
| | | TGTTCATCTTCCCCCCCAGCGACGAGCAGCTGAAGAGCGG |
| | | CACCGCCAGCGTGGTGTGCCTGCTGAACAACTTCTACCCC |
| | | CGGGAGGCCAAGGTGCAGTGGAAGGTGGACAACGCCCTG |
| | | CAGAGCGGCAACAGCCAGGAGAGCGTCACCGAGCAGGAC |
| | | AGCAAGGACTCCACCTACAGCCTGAGCAGCACCCTGACCC |
| | | TGAGCAAGGCCGACTACGAGAAGCATAAGGTGTACGCCTG |
| | | CGAGGTGACCCACCAGGGCCTGTCCAGCCCCGTGACCAAG |
| | | AGCTTCAACAGGGGCGAGTGC |
| BAP049-Clone-E HC | | |
| SEQ ID NO: 22 | HCDR1 | TYWMH |
| (Kabat) | | |
| SEQ ID NO: 3018 | HCDR2 | NIYPGTGGSNFDEKFKN |
| (Kabat) | | |
| SEQ ID NO: 3019 | HCDR3 | WTTGTGAY |
| (Kabat) | | |
| SEQ ID NO: 3020 | HCDR1 | GYTFTTY |
| (Chothia) | | |
| SEQ ID NO: 3021 | HCDR2 | YPGTGG |
| (Chothia) | | |
| SEQ ID NO: 3019 | HCDR3 | WTTGTGAY |
| (Chothia) | | |
| SEQ ID NO: 27 | VH | EVQLVQSGAEVKKPGESLRISCKGSGYTFTTYWMHWVRQAT |
| | | GQGLEWMGNIYPGTGGSNFDEKFKNRVTITADKSTSTAYME |
| | | LSSLRSEDTAVYYCTRWTTGTGAYWGQGTTVTVSS |
| SEQ ID NO: 28 | DNA | GAGGTGCAGCTGGTGCAGTCAGGCGCCGAAGTGAAGAAG |
| | VH | CCCGGCGAGTCACTGAGAATTAGCTGTAAAGGTTCAGGCT |
| | | ACACCTTCACTACCTACTGGATGCACTGGGTCCGCCAGGC |
| | | TACCGGTCAAGGCCTCGAGTGGATGGGTAATATCTACCCC |
| | | GGCACCGGCGGCTCTAACTTCGACGAGAAGTTTAAGAATA |
| | | GAGTGACTATCACCGCCGATAAGTCTACTAGCACCGCCTA |
| | | TATGGAACTGTCTAGCCTGAGATCAGAGGACACCGCCGTC |
| | | TACTACTGCACTAGGTGGACTACCGGCACAGGCGCCTACT |
| | | GGGGTCAAGGCACTACCGTGACCGTGTCTAGC |
| SEQ ID NO: 29 | Heavy | EVQLVQSGAEVKKPGESLRISCKGSGYTFTTYWMHWVRQAT |
| | chain | GQGLEWMGNIYPGTGGSNFDEKFKNRVTITADKSTSTAYME |
| | | LSSLRSEDTAVYYCTRWTTGTGAYWGQGTTVTVSSASTKGP |
| | | SVFPLAPCSRSTSESTAALGCLVKDYFPEPVTVSWNSGALTSG |
| | | VHTFPAVLQSSGLYSLSSVVTVPSSSLGTKTYTCNVDHKPSNT |
| | | KVDKRVESKYGPPCPPCPAPEFLGGPSVFLFPPKPKDTLMISR |
| | | TPEVTCVVVDVSQEDPEVQFNWYVDGVEVHNAKTKPREEQF |
| | | NSTYRVVSVLTVLHQDWLNGKEYKCKVSNKGLPSSIEKTISK |
| | | AKGQPREPQVYTLPPSQEEMTKNQVSLTCLVKGFYPSDIAVE |
| | | WESNGQPENNYKTTPPVLDSDGSFFLYSRLTVDKSRWQEGN |
| | | VFSCSVMHEALHNHYTQKSLSLSLG |
| SEQ ID NO: 30 | DNA | GAGGTGCAGCTGGTGCAGTCAGGCGCCGAAGTGAAGAAG |
| | heavy | CCCGGCGAGTCACTGAGAATTAGCTGTAAAGGTTCAGGCT |
| | chain | ACACCTTCACTACCTACTGGATGCACTGGGTCCGCCAGGC |
| | | TACCGGTCAAGGCCTCGAGTGGATGGGTAATATCTACCCC |
| | | GGCACCGGCGGCTCTAACTTCGACGAGAAGTTTAAGAATA |
| | | GAGTGACTATCACCGCCGATAAGTCTACTAGCACCGCCTA |
| | | TATGGAACTGTCTAGCCTGAGATCAGAGGACACCGCCGTC |
| | | TACTACTGCACTAGGTGGACTACCGGCACAGGCGCCTACT |
| | | GGGGTCAAGGCACTACCGTGACCGTGTCTAGCGCTAGCAC |
| | | TAAGGGCCCGTCCGTGTTCCCCCTGGCACCTTGTAGCCGG |
| | | AGCACTAGCGAATCCACCGCTGCCCTCGGCTGCCTGGTCA |
| | | AGGATTACTTCCCGGAGCCCGTGACCGTGTCCTGGAACAG |
| | | CGGAGCCCTGACCTCCGGAGTGCACACCTTCCCCGCTGTG |
| | | CTGCAGAGCTCCGGGCTGTACTCGCTGTCGTCGGTGGTCA |
| | | CGGTGCCTTCATCTAGCCTGGGTACCAAGACCTACACTTGC |
| | | AACGTGGACCACAAGCCTTCCAACACTAAGGTGGACAAGC |
| | | GCGTCGAATCGAAGTACGGCCCACCGTGCCCGCCTTGTCC |
| | | CGCGCCGGAGTTCCTCGGCGGTCCCTCGGTCTTTCTGTTCC |
| | | CACCGAAGCCCAAGGACACTTTGATGATTTCCCGCACCCC |
| | | TGAAGTGACATGCGTGGTCGTGGACGTGTCACAGGAAGAT |
| | | CCGGAGGTGCAGTTCAATTGGTACGTGGATGGCGTCGAGG |
| | | TGCACAACGCCAAAACCAAGCCGAGGGAGGAGCAGTTCA |
| | | ACTCCACTTACCGCGTCGTGTCCGTGCTGACGGTGCTGCAT |
| | | CAGGACTGGCTGAACGGGAAGGAGTACAAGTGCAAAGTG |
| | | TCCAACAAGGGACTTCCTAGCTCAATCGAAAAGACCATCT |
| | | CGAAAGCCAAGGGACAGCCCCGGGAACCCCAAGTGTATA |
| | | CCCTGCCACCGAGCCAGGAAGAAATGACTAAGAACCAAG |
| | | TCTCATTGACTTGCCTTGTGAAGGGCTTCTACCCATCGGAT |
| | | ATCGCCGTGGAATGGGAGTCCAACGGCCAGCCGGAAAAC |
| | | AACTACAAGACCACCCCTCCGGTGCTGGACTCAGACGGAT |
| | | CCTTCTTCCTCTACTCGCGGCTGACCGTGGATAAGAGCAG |
| | | ATGGCAGGAGGGAAATGTGTTCAGCTGTTCTGTGATGCAT |
| | | GAAGCCCTGCACAACCACTACACTCAGAAGTCCCTGTCCC |
| | | TCTCCCTGGGA |
| BAP049-Clone-E LC | | |
| SEQ ID NO: 31 | LCDR1 | KSSQSLLDSGNQKNFLT |
| (Kabat) | | |
| SEQ ID NO: 32 | LCDR2 | WASTRES |
| (Kabat) | | |
| SEQ ID NO: | LCDR3 | QNDYSYPYT |
| 286(Kabat) | | |
| SEQ ID NO: 34 | LCDR1 | SQSLLDSGNQKNF |
| (Chothia) | | |
| SEQ ID NO: 35 | LCDR2 | WAS |
| (Chothia) | | |
| SEQ ID NO: 36 | LCDR3 | DYSYPY |
| (Chothia) | | |
| SEQ ID NO: 3025 | VL | EIVLTQSPATLSLSPGERATLSCKSSQSLLDSGNQKNFLTWYQ |
| | | QKPGQAPRLLIYWASTRESGVPSRFSGSGSGTDFTFTISSLEAE |
| | | DAATYYCQNDYSYPYTFGQGTKVEIK |
| SEQ ID NO: 3027 | DNA | GAGATCGTCCTGACTCAGTCACCCGCTACCCTGAGCCTGA |
| | VL | GCCCTGGCGAGCGGGCTACACTGAGCTGTAAATCTAGTCA |
| | | GTCACTGCTGGATAGCGGTAATCAGAAGAACTTCCTGACC |
| | | TGGTATCAGCAGAAGCCCGGTCAAGCCCCTAGACTGCTGA |
| | | TCTACTGGGCCTCTACTAGAGAATCAGGCGTGCCCTCTAG |
| | | GTTTAGCGGTAGCGGTAGTGGCACCGACTTCACCTTCACT |
| | | ATCTCTAGCCTGGAAGCCGAGGACGCCGCTACCTACTACT |
| | | GTCAGAACGACTATAGCTACCCCTACACCTTCGGTCAAGG |
| | | CACTAAGGTCGAGATTAAG |
| SEQ ID NO: 3029 | Light | EIVLTQSPATLSLSPGERATLSCKSSQSLLDSGNQKNFLTWYQ |
| | chain | QKPGQAPRLLIYWASTRESGVPSRFSGSGSGTDFTFTISSLEAE |
| | | DAATYYCQNDYSYPYTFGQGTKVEIKRTVAAPSVFIFPPSDE |
| | | QLKSGTASVVCLLNNFYPREAKVQWKVDNALQSGNSQESVT |
| | | EQDSKDSTYSLSSTLTLSKADYEKHKVYACEVTHQGLSSPVT |
| | | KSFNRGEC |
| SEQ ID NO: 3030 | DNA | GAGATCGTCCTGACTCAGTCACCCGCTACCCTGAGCCTGA |
| | light | GCCCTGGCGAGCGGGCTACACTGAGCTGTAAATCTAGTCA |
| | chain | GTCACTGCTGGATAGCGGTAATCAGAAGAACTTCCTGACC |
| | | TGGTATCAGCAGAAGCCCGGTCAAGCCCCTAGACTGCTGA |
| | | TCTACTGGGCCTCTACTAGAGAATCAGGCGTGCCCTCTAG |
| | | GTTTAGCGGTAGCGGTAGTGGCACCGACTTCACCTTCACT |
| | | ATCTCTAGCCTGGAAGCCGAGGACGCCGCTACCTACTACT |
| | | GTCAGAACGACTATAGCTACCCCTACACCTTCGGTCAAGG |
| | | CACTAAGGTCGAGATTAAGCGTACGGTGGCCGCTCCCAGC |
| | | GTGTTCATCTTCCCCCCCAGCGACGAGCAGCTGAAGAGCG |
| | | GCACCGCCAGCGTGGTGTGCCTGCTGAACAACTTCTACCC |
| | | CCGGGAGGCCAAGGTGCAGTGGAAGGTGGACAACGCCCT |
| | | GCAGAGCGGCAACAGCCAGGAGAGCGTCACCGAGCAGGA |
| | | CAGCAAGGACTCCACCTACAGCCTGAGCAGCACCCTGACC |
| | | CTGAGCAAGGCCGACTACGAGAAGCATAAGGTGTACGCCT |
| | | GCGAGGTGACCCACCAGGGCCTGTCCAGCCCCGTGACCAA |
| | | GAGCTTCAACAGGGGCGAGTGC |
| BAP049-Clone-B HC | | |
| SEQ ID NO: | HCDR1 | ACCTACTGGATGCAC |
| 3031 (Kabat) | | |
| SEQ ID NO: 3032 | HCDR2 | AATATCTACCCCGGCACCGGCGGCTCTAACTTCGACGAGA |
| (Kabat) | | AGTTTAAGAAT |
| SEQ ID NO: 3033 | HCDR3 | TGGACTACCGGCACAGGCGCCTAC |
| (Kabat) | | |
| SEQ ID NO: | HCDR1 | GGCTACACCTTCACTACCTAC |
| 3034(Chothia) | | |
| SEQ ID NO: 3035 | HCDR2 | TACCCCGGCACCGGCGGC |
| (Chothia) | | |
| SEQ ID NO: 3033 | HCDR3 | TGGACTACCGGCACAGGCGCCTAC |
| (Chothia) | | |
| BAP049-Clone-B LC | | |
| SEQ ID NO: 3036 | LCDR1 | AAATCTAGTCAGTCACTGCTGGATAGCGGTAATCAGAAGA |
| (Kabat) | | ACTTCCTGACC |
| SEQ ID NO: 3037 | LCDR2 | TGGGCCTCTACTAGAGAATCA |
| (Kabat) | | |
| SEQ ID NO: 3038 | LCDR3 | CAGAACGACTATAGCTACCCCTACACC |
| (Kabat) | | |
| SEQ ID NO: 3039 | LCDR1 | AGTCAGTCACTGCTGGATAGCGGTAATCAGAAGAACTTC |
| (Chothia) | | |
| SEQ ID NO: 3040 | LCDR2 | TGGGCCTCT |
| (Chothia) | | |
| SEQ ID NO: | LCDR3 | GACTATAGCTACCCCTAC |
| 3041(Chothia) | | |
| BAP049-Clone-E HC | | |
| SEQ ID NO: 3031 | HCDR1 | ACCTACTGGATGCAC |
| (Kabat) | | |
| SEQ ID NO: 3032 | HCDR2 | AATATCTACCCCGGCACCGGCGGCTCTAACTTCGACGAGA |
| (Kabat) | | AGTTTAAGAAT |
| SEQ ID NO: | HCDR3 | TGGACTACCGGCACAGGCGCCTAC |
| 3033(Kabat) | | |
| SEQ ID NO: 3034 | HCDR1 | GGCTACACCTTCACTACCTAC |
| (Chothia) | | |
| SEQ ID NO: 3035 | HCDR2 | TACCCCGGCACCGGCGGC |
| (Chothia) | | |
| SEQ ID NO: | HCDR3 | TGGACTACCGGCACAGGCGCCTAC |
| 3033(Chothia) | | |
| BAP049-Clone-E LC | | |
| SEQ ID NO: 3036 | LCDR1 | AAATCTAGTCAGTCACTGCTGGATAGCGGTAATCAGAAGA |
| (Kabat) | | ACTTCCTGACC |
| SEQ ID NO: 3037 | LCDR2 | TGGGCCTCTACTAGAGAATCA |
| (Kabat) | | |
| SEQ ID NO: 3038 | LCDR3 | CAGAACGACTATAGCTACCCCTACACC |
| (Kabat) | | |
| SEQ ID NO: 3039 | LCDR1 | AGTCAGTCACTGCTGGATAGCGGTAATCAGAAGAACTTC |
| (Chothia) | | |
| SEQ ID NO: 3040 | LCDR2 | TGGGCCTCT |
| (Chothia) | | |
| SEQ ID NO: 3041 | LCDR3 | GACTATAGCTACCCCTAC |
| (Chothia) | | |

[0865] Other Exemplary PD-1 Inhibitors

[0866] In some embodiments, the anti-PD-1 antibody is Nivolumab (CAS Registry Number: 946414-94-4). Alternative names for Nivolumab include MDX-1106, MDX-1106-04, ONO-4538, BMS-936558 or OPDIVO®. Nivolumab is a fully human IgG4 monoclonal antibody, which specifically blocks PD1. Nivolumab (clone 5C4) and other human monoclonal antibodies that specifically bind to PD1 are disclosed in U.S. Pat. No. 8,008,449 and PCT Publication No. WO2006/121168, incorporated by reference in their entirety. In one embodiment, the anti-PD-1 antibody molecule comprises one or more of the CDR sequences (or collectively all of the CDR sequences), the heavy chain or light chain variable region sequence, or the heavy chain or light chain sequence of Nivolumab, e.g., as disclosed in Table 15.

[0867] In other embodiments, the anti-PD-1 antibody is Pembrolizumab. Pembrolizumab (Trade name KEYTRUDA formerly Lambrolizumab, also known as Merck 3745, MK-3475 or SCH-900475) is a humanized IgG4 monoclonal antibody that binds to PD1. Pembrolizumab is disclosed, e.g., in Hamid, O. et al. (2013) New England Journal of Medicine 369 (2): 134-44, PCT Publication No. WO2009/114335, and U.S. Pat. No. 8,354,509, incorporated by reference in their entirety. In one embodiment, the anti-PD-1 antibody molecule comprises one or more of the CDR sequences (or collectively all of the CDR sequences), the heavy chain or light chain variable region sequence, or the heavy chain or light chain sequence of Pembrolizumab, e.g., as disclosed in Table 15.

[0868] In some embodiments, the anti-PD-1 antibody is Pidilizumab. Pidilizumab (CT-011; Cure Tech) is a humanized IgG1k monoclonal antibody that binds to PD1. Pidilizumab and other humanized anti-PD-1 monoclonal antibodies are disclosed in PCT Publication No. WO2009/101611, incorporated by reference in their entirety. In one embodiment, the anti-PD-1 antibody molecule comprises one or more of the CDR sequences (or collectively all of the CDR sequences), the heavy chain or light chain variable region sequence, or the heavy chain or light chain sequence of Pidilizumab, e.g., as disclosed in Table 15.

[0869] Other anti-PD1 antibodies are disclosed in U.S. Pat. No. 8,609,089, US Publication No. 2010028330, and/or US Publication No. 20120114649, incorporated by reference in their entirety. Other anti-PD1 antibodies include AMP 514 (Amplimmune).

[0870] In one embodiment, the anti-PD-1 antibody molecule is MEDI0680 (Medimmune), also known as AMP-514. MEDI0680 and other anti-PD-1 antibodies are disclosed in U.S. Pat. No. 9,205,148 and WO 2012/145493, incorporated by reference in their entirety. In one embodiment, the anti-PD-1 antibody molecule comprises one or more of the CDR sequences (or collectively all of the CDR sequences), the heavy chain or light chain variable region sequence, or the heavy chain or light chain sequence of MEDI0680.

[0871] In one embodiment, the anti-PD-1 antibody molecule is Cemiplimab (Regeneron), also known as REGN2810. In one embodiment, the anti-PD-1 antibody molecule comprises one or more of the CDR sequences (or collectively all of the CDR sequences), the heavy chain or light chain variable region sequence, or the heavy chain or light chain sequence of REGN2810.

[0872] In one embodiment, the anti-PD-1 antibody molecule is PF-06801591 (Pfizer). In one embodiment, the anti-PD-1 antibody molecule comprises one or more of the CDR sequences (or collectively all of the CDR sequences), the heavy chain or light chain variable region sequence, or the heavy chain or light chain sequence of PF-06801591.

[0873] In one embodiment, the anti-PD-1 antibody molecule is Tislelizumab (Beigene), also known as BGB-A317 or BGB-108. In one embodiment, the anti-PD-1 antibody molecule comprises one or more of the CDR sequences (or collectively all of the CDR sequences), the heavy chain or light chain variable region sequence, or the heavy chain or light chain sequence of BGB-A317 or BGB-108.

[0874] In one embodiment, the anti-PD-1 antibody molecule is INCSHR1210 (Incyte), also known as INCSHRO1210 or SHR-1210. In one embodiment, the anti-PD-1 antibody molecule comprises one or more of the CDR sequences (or collectively all of the CDR sequences), the heavy chain or light chain variable region sequence, or the heavy chain or light chain sequence of INCSHR1210.

[0875] In one embodiment, the anti-PD-1 antibody molecule is Dostarlimab (Tesaro), also known as TSR-042, also known as ANBO11. In one embodiment, the anti-PD-1 antibody molecule comprises one or more of the CDR sequences (or collectively all of the CDR sequences), the heavy chain or light chain variable region sequence, or the heavy chain or light chain sequence of TSR-042.

[0876] In one embodiment, the anti-PD-1 antibody molecule is Balstilimab (Agenus), also known as AGEN2035. In one embodiment, the anti-PD-1 antibody molecule comprises one or more of the CDR sequences (or collectively all of the CDR sequences), the heavy chain or light chain variable region sequence, or the heavy chain or light chain sequence of Balstilimab.

[0877] In one embodiment, the anti-PD-1 antibody molecule is Sintilimab (InnoVent), In one embodiment, the anti-PD-1 antibody molecule comprises one or more of the CDR sequences (or collectively all of the CDR sequences), the heavy chain or light chain variable region sequence, or the heavy chain or light chain sequence of Sintilimab.

[0878] In one embodiment, the anti-PD-1 antibody molecule is Toripalimab (Shanghai Junshi Bioscience). In one embodiment, the anti-PD-1 antibody molecule comprises one or more of the CDR sequences (or collectively all of the CDR sequences), the heavy chain or light chain variable region sequence, or the heavy chain or light chain sequence of Toripalimab.

[0879] In one embodiment, the anti-PD-1 antibody molecule is Camrelizumab (Jiangsu Hengrui Medicine Co.). In one embodiment, the anti-PD-1 antibody molecule comprises one or more of the CDR sequences (or collectively all of the CDR sequences), the heavy chain or light chain variable region sequence, or the heavy chain or light chain sequence of Camrelizumab.

[0880] Further known anti-PD-1 antibodies include those described, e.g., in WO 2015/112800, WO 2016/092419, WO 2015/085847, WO 2014/179664, WO 2014/194302, WO 2014/209804, WO 2015/200119, U.S. Pat. Nos. 8,735,553, 7,488,802, 8,927,697, 8,993,731, and 9,102,727, incorporated by reference in their entirety.

[0881] In one embodiment, the anti-PD-1 antibody is an antibody that competes for binding with, and/or binds to the same epitope on PD-1 as, one of the anti-PD-1 antibodies described herein.

[0882] In one embodiment, the PD-1 inhibitor is a peptide that inhibits the PD-1 signalling pathway, e.g., as described in U.S. Pat. No. 8,907,053, incorporated by reference in its entirety. In some embodiments, the PD-1 inhibitor is an immunoadhesin (e.g., an immunoadhesin comprising an extracellular or PD-1 binding portion of PD-L1 or PD-L2 fused to a constant region (e.g., an Fc region of an immunoglobulin sequence). In some embodiments, the PD-1 inhibitor is AMP-224 (B7-DCIg (Amplimmune), e.g., disclosed in WO 2010/027827 and WO 2011/066342, incorporated by reference in their entirety). Table 15. Amino acid sequences of other exemplary anti-PD-1 antibody molecules

TABLE 15
Amino acid sequences of other exemplary anti-PD-1 antibody molecules

| | | |
|---|---|---|
| Nivolumab | | |
| SEQ ID NO: | Heavy | QVQLVESGGGVVQPGRSLRLDCKASGITFSNSGMHWVRQAPGKGL |
| 3042 | chain | EWVAVIWYDGSKRYYADSVKGRFTISRDNSKNTLFLQMNSLRAED |
| | | TAVYYCATNDDYWGQGTLVTVSSASTKGPSVFPLAPCSRSTSESTA |
| | | ALGCLVKDYFPEPVTVSWNSGALTSGVHTFPAVLQSSGLYSLSSVV |
| | | TVPSSSLGTKTYTCNVDHKPSNTKVDKRVESKYGPPCPPCPAPEFLG |
| | | GPSVFLFPPKPKDTLMISRTPEVTCVVVDVSQEDPEVQFNWYVDGV |
| | | EVHNAKTKPREEQFNSTYRVVSVLTVLHQDWLNGKEYKCKVSNKG |
| | | LPSSIEKTISKAKGQPREPQVYTLPPSQEEMTKNQVSLTCLVKGFYPS |
| | | DIAVEWESNGQPENNYKTTPPVLDSDGSFFLYSRLTVDKSRWQEGN |
| | | VFSCSVMHEALHNHYTQKSLSLSLGK |
| SEQ ID NO: | Light | EIVLTQSPATLSLSPGERATLSCRASQSVSSYLAWYQQKPGQAPRLLI |
| 3043 | chain | YDASNRATGIPARFSGSGSGTDFTLTISSLEPEDFAVYYCQQSSNWP |
| | | RTFGQGTKVEIKRTVAAPSVFIFPPSDEQLKSGTASVVCLLNNFYPRE |
| | | AKVQWKVDNALQSGNSQESVTEQDSKDSTYSLSSTLTLSKADYEK |
| | | HKVYACEVTHQGLSSPVTKSFNRGEC |
| Pembrolizumab | | |
| SEQ ID NO: | Heavy | QVQLVQSGVEVKKPGASVKVSCKASGYTFTNYYMYWVRQAPGQG |
| 3044 | chain | LEWMGGINPSNGGTNFNEKFKNRVTLTTDSSTTTAYMELKSLQFDD |
| | | TAVYYCARRDYRFDMGFDYWGQGTTVTVSSASTKGPSVFPLAPCS |
| | | RSTSESTAALGCLVKDYFPEPVTVSWNSGALTSGVHTFPAVLQSSGL |
| | | YSLSSVVTVPSSSLGTKTYTCNVDHKPSNTKVDKRVESKYGPPCPPC |
| | | PAPEFLGGPSVFLFPPKPKDTLMISRTPEVTCVVVDVSQEDPEVQFN |
| | | WYVDGVEVHNAKTKPREEQFNSTYRVVSVLTVLHQDWLNGKEYK |
| | | CKVSNKGLPSSIEKTISKAKGQPREPQVYTLPPSQEEMTKNQVSLTC |
| | | LVKGFYPSDIAVEWESNGQPENNYKTTPPVLDSDGSFFLYSRLTVDK |
| | | SRWQEGNVFSCSVMHEALHNHYTQKSLSLSLGK |
| SEQ ID NO: | Light | EIVLTQSPATLSLSPGERATLSCRASKGVSTSGYSYLHWYQQKPGQA |
| 3045 | chain | PRLLIYLASYLESGVPARFSGSGSGTDFTLTISSLEPEDFAVYYCQHS |
| | | RDLPLTFGGGTKVEIKRTVAAPSVFIFPPSDEQLKSGTASVVCLLNNF |
| | | YPREAKVQWKVDNALQSGNSQESVTEQDSKDSTYSLSSTLTLSKAD |
| | | YEKHKVYACEVTHQGLSSPVTKSFNRGEC |
| Pidilizumab | | |
| SEQ ID NO: | Heavy | QVQLVQSGSELKKPGASVKISCKASGYTFTNYGMNWVRQAPGQGL |
| 3046 | chain | QWMGWINTDSGESTYAEEFKGRFVFSLDTSVNTAYLQITSLTAEDT |
| | | GMYFCVRVGYDALDYWGQGTLVTVSSASTKGPSVFPLAPSSKSTSG |
| | | GTAALGCLVKDYFPEPVTVSWNSGALTSGVHTFPAVLQSSGLYSLS |
| | | SVVTVPSSSLGTQTYICNVNHKPSNTKVDKRVEPKSCDKTHTCPPCP |
| | | APELLGGPSVFLFPPKPKDTLMISRTPEVTCVVVDVSHEDPEVKFNW |
| | | YVDGVEVHNAKTKPREEQYNSTYRVVSVLTVLHQDWLNGKEYKC |
| | | KVSNKALPAPIEKTISKAKGQPREPQVYTLPPSREEMTKNQVSLTCL |
| | | VKGFYPSDIAVEWESNGQPENNYKTTPPVLDSDGSFFLYSKLTVDKS |
| | | RWQQGNVFSCSVMHEALHNHYTQKSLSLSPGK |
| SEQ ID NO: | Light | EIVLTQSPSSLSASVGDRVTITCSARSSVSYMHWFQQKPGKAPKLWI |
| 3047 | chain | YRTSNLASGVPSRFSGSGSGTSYCLTINSLQPEDFATYYCQQRSSFPL |
| | | TFGGGTKLEIKRTVAAPSVFIFPPSDEQLKSGTASVVCLLNNFYPREA |
| | | KVQWKVDNALQSGNSQESVTEQDSKDSTYSLSSTLTLSKADYEKH |
| | | KVYACEVTHQGLSSPVTKSFNRGEC |

### PD-L1 Inhibitors

[0883] In some embodiments, the ZBTB32 inhibitor, or a pharmaceutically acceptable salt, hydrate, solvate, prodrug, stereoisomer, or tautomer thereof, of the present disclosure are used in combination with a PD-L1 inhibitor for treating a disease, e.g., cancer. In some embodiments, the PD-L1 inhibitor is selected from FAZ053 (Novartis), Atezolizumab (Genentech/Roche), Avelumab (Merck Serono and Pfizer), Durvalumab (MedImmune/AstraZeneca), or BMS-936559 (Bristol-Myers Squibb).

[0884] Exemplary PD-L1 Inhibitors

[0885] In one embodiment, the PD-L1 inhibitor is an anti-PD-L1 antibody molecule. In one embodiment, the PD-L1 inhibitor is an anti-PD-L1 antibody molecule as disclosed in US 2016/0108123, published on Apr. 21, 2016, entitled “Antibody Molecules to PD-L1 and Uses Thereof,” incorporated by reference in its entirety.

[0886] In one embodiment, the anti-PD-L1 antibody molecule comprises at least one, two, three, four, five or six complementarity determining regions (CDRs) (or collectively all of the CDRs) from a heavy and light chain variable region comprising an amino acid sequence shown in Table 16 (e.g., from the heavy and light chain variable region sequences of BAP058-Clone O or BAP058-Clone N disclosed in Table 16), or encoded by a nucleotide sequence shown in Table 16. In some embodiments, the CDRs are according to the Kabat definition (e.g., as set out in Table 16). In some embodiments, the CDRs are according to the Chothia definition (e.g., as set out in Table 16). In some embodiments, the CDRs are according to the combined CDR definitions of both Kabat and Chothia (e.g., as set out in Table 16). In one embodiment, the combination of Kabat and Chothia CDR of VH CDR1 comprises the amino acid sequence GYTFTSYWMY (SEQ ID NO: 3199). In one embodiment, one or more of the CDRs (or collectively all of the CDRs) have one, two, three, four, five, six or more changes, e.g., amino acid substitutions (e.g., conservative amino acid substitutions) or deletions, relative to an amino acid sequence shown in Table 16, or encoded by a nucleotide sequence shown in Table 16.

[0887] In one embodiment, the anti-PD-L1 antibody molecule comprises a heavy chain variable region (VH) comprising a VHCDR1 amino acid sequence of SEQ ID NO: 3048, a VHCDR2 amino acid sequence of SEQ ID NO: 3049, and a VHCDR3 amino acid sequence of SEQ ID NO: 3050; and a light chain variable region (VL) comprising a VLCDR1 amino acid sequence of SEQ ID NO: 3056, a VLCDR2 amino acid sequence of SEQ ID NO: 3057, and a VLCDR3 amino acid sequence of SEQ ID NO: 3058, each disclosed in Table 16.

[0888] In one embodiment, the anti-PD-L1 antibody molecule comprises a VH comprising a VHCDR1 encoded by the nucleotide sequence of SEQ ID NO: 3075, a VHCDR2 encoded by the nucleotide sequence of SEQ ID NO: 3076, and a VHCDR3 encoded by the nucleotide sequence of SEQ ID NO: 3077; and a VL comprising a VLCDR1 encoded by the nucleotide sequence of SEQ ID NO: 3080, a VLCDR2 encoded by the nucleotide sequence of SEQ ID NO: 3081, and a VLCDR3 encoded by the nucleotide sequence of SEQ ID NO: 3082, each disclosed in Table 16.

[0889] In one embodiment, the anti-PD-L1 antibody molecule comprises a VH comprising the amino acid sequence of SEQ ID NO: 3053, or an amino acid sequence at least 85%, 90%, 95%, or 99% identical or higher to SEQ ID NO: 3053. In one embodiment, the anti-PD-L1 antibody molecule comprises a VL comprising the amino acid sequence of SEQ ID NO: 3063, or an amino acid sequence at least 85%, 90%, 95%, or 99% identical or higher to SEQ ID NO: 3063. In one embodiment, the anti-PD-L1 antibody molecule comprises a VH comprising the amino acid sequence of SEQ ID NO: 3067, or an amino acid sequence at least 85%, 90%, 95%, or 99% identical or higher to SEQ ID NO: 3067. In one embodiment, the anti-PD-L1 antibody molecule comprises a VL comprising the amino acid sequence of SEQ ID NO: 3071, or an amino acid sequence at least 85%, 90%, 95%, or 99% identical or higher to SEQ ID NO: 3071. In one embodiment, the anti-PD-L1 antibody molecule comprises a VH comprising the amino acid sequence of SEQ ID NO: 3053 and a VL comprising the amino acid sequence of SEQ ID NO: 3063. In one embodiment, the anti-PD-L1 antibody molecule comprises a VH comprising the amino acid sequence of SEQ ID NO: 3067 and a VL comprising the amino acid sequence of SEQ ID NO: 3071.

[0890] In one embodiment, the antibody molecule comprises a VH encoded by the nucleotide sequence of SEQ ID NO: 3054, or a nucleotide sequence at least 85%, 90%, 95%, or 99% identical or higher to SEQ ID NO: 3054. In one embodiment, the antibody molecule comprises a VL encoded by the nucleotide sequence of SEQ ID NO: 3064, or a nucleotide sequence at least 85%, 90%, 95%, or 99% identical or higher to SEQ ID NO: 3064. In one embodiment, the antibody molecule comprises a VH encoded by the nucleotide sequence of SEQ ID NO: 3068, or a nucleotide sequence at least 85%, 90%, 95%, or 99% identical or higher to SEQ ID NO: 3068. In one embodiment, the antibody molecule comprises a VL encoded by the nucleotide sequence of SEQ ID NO: 3072, or a nucleotide sequence at least 85%, 90%, 95%, or 99% identical or higher to SEQ ID NO: 3072. In one embodiment, the antibody molecule comprises a VH encoded by the nucleotide sequence of SEQ ID NO: 3054 and a VL encoded by the nucleotide sequence of SEQ ID NO: 3064. In one embodiment, the antibody molecule comprises a VH encoded by the nucleotide sequence of SEQ ID NO: 3068 and a VL encoded by the nucleotide sequence of SEQ ID NO: 3072.

[0891] In one embodiment, the anti-PD-L1 antibody molecule comprises a heavy chain comprising the amino acid sequence of SEQ ID NO: 3055, or an amino acid sequence at least 85%, 90%, 95%, or 99% identical or higher to SEQ ID NO: 3055. In one embodiment, the anti-PD-L1 antibody molecule comprises a light chain comprising the amino acid sequence of SEQ ID NO: 3065, or an amino acid sequence at least 85%, 90%, 95%, or 99% identical or higher to SEQ ID NO: 3065. In one embodiment, the anti-PD-L1 antibody molecule comprises a heavy chain comprising the amino acid sequence of SEQ ID NO: 3069, or an amino acid sequence at least 85%, 90%, 95%, or 99% identical or higher to SEQ ID NO: 3069. In one embodiment, the anti-PD-L1 antibody molecule comprises a light chain comprising the amino acid sequence of SEQ ID NO: 3073, or an amino acid sequence at least 85%, 90%, 95%, or 99% identical or higher to SEQ ID NO: 3073. In one embodiment, the anti-PD-L1 antibody molecule comprises a heavy chain comprising the amino acid sequence of SEQ ID NO: 3055 and a light chain comprising the amino acid sequence of SEQ ID NO: 3065. In one embodiment, the anti-PD-L1 antibody molecule comprises a heavy chain comprising the amino acid sequence of SEQ ID NO: 3069 and a light chain comprising the amino acid sequence of SEQ ID NO: 3073.

[0892] In one embodiment, the antibody molecule comprises a heavy chain encoded by the nucleotide sequence of SEQ ID NO: 3062, or a nucleotide sequence at least 85, 90%, 95% or 99% identical or higher to SEQ ID NO: 3062. In one embodiment, the antibody molecule comprises a light chain encoded by the nucleotide sequence of SEQ ID NO: 3066, or a nucleotide sequence at least 85%, 90%, 95%, or 99% identical or higher to SEQ ID NO: 3066. In one embodiment, the antibody molecule comprises a heavy chain encoded by the nucleotide sequence of SEQ ID NO: 3070, or a nucleotide sequence at least 85%, 90%, 95%, or 99% identical or higher to SEQ ID NO: 3070. In one embodiment, the antibody molecule comprises a light chain encoded by the nucleotide sequence of SEQ ID NO: 3074, or a nucleotide sequence at least 85D, 90N, 95S or 99 identical or higher to SEQ ID NO: 3074. In one embodiment, the antibody molecule comprises a heavy chain encoded by the nucleotide sequence of SEQ ID NO: 3062 and a light chain encoded by the nucleotide sequence of SEQ ID NO: 3066. In one embodiment, the antibody molecule comprises a heavy chain encoded by the nucleotide sequence of SEQ ID NO: 3070 and a light chain encoded by the nucleotide sequence of SEQ ID NO: 3074.

[0893] The antibody molecules described herein can be made by vectors, host cells, and methods described in US 2016/0108123, incorporated by reference in its entirety.

TABLE 16
Amino acid and nucleotide sequences of exemplary
anti-PD-L1 antibody molecules

| | | |
|---|---|---|
| BAP058-Clone O HC | | |
| SEQ ID NO: 3048 | HCDR1 | SYWMY |
| (Kabat) | | |
| SEQ ID NO: | HCDR2 | RIDPNSGSTKYNEKFKN |
| 3049(Kabat) | | |
| SEQ ID NO: 3050 | HCDR3 | DYRKGLYAMDY |
| (Kabat) | | |
| SEQ ID NO: 3051 | HCDR1 | GYTFTSY |
| (Chothia) | | |
| SEQ ID NO: 3052 | HCDR2 | DPNSGS |
| (Chothia) | | |
| SEQ ID NO: 3050 | HCDR3 | DYRKGLYAMDY |
| (Chothia) | | |
| SEQ ID NO: 3053 | VH | EVQLVQSGAEVKKPGATVKISCKVSGYTFTSYWMYWVR |
| | | QARGQRLEWIGRIDPNSGSTKYNEKFKNRFTISRDNSKNTL |
| | | YLQMNSLRAEDTAVYYCARDYRKGLYAMDYWGQGTTVTVSS |
| SEQ ID NO: 3054 | DNA | GAAGTGCAGCTGGTGCAGTCAGGCGCCGAAGTGAAGAA |
| | VH | ACCCGGCGCTACCGTGAAGATTAGCTGTAAAGTCTCAG |
| | | GCTACACCTTCACTAGCTACTGGATGTACTGGGTCCGAC |
| | | AGGCTAGAGGGCAAAGACTGGAGTGGATCGGTAGAATC |
| | | GACCCTAATAGCGGCTCTACTAAGTATAACGAGAAGTT |
| | | TAAGAATAGGTTCACTATTAGTAGGGATAACTCTAAGA |
| | | ACACCCTGTACCTGCAGATGAATAGCCTGAGAGCCGAG |
| | | GACACCGCCGTCTACTACTGCGCTAGAGACTATAGAAA |
| | | GGGCCTGTACGCTATGGACTACTGGGGTCAAGGCACTA |
| | | CCGTGACCGTGTCTTCA |
| SEQ ID NO: 3055 | Heavy | EVQLVQSGAEVKKPGATVKISCKVSGYTFTSYWMYWVR |
| | chain | QARGQRLEWIGRIDPNSGSTKYNEKFKNRFTISRDNSKNTL |
| | | YLQMNSLRAEDTAVYYCARDYRKGLYAMDYWGQGTTV |
| | | TVSSASTKGPSVFPLAPCSRSTSESTAALGCLVKDYFPEPV |
| | | TVSWNSGALTSGVHTFPAVLQSSGLYSLSSVVTVPSSSLGT |
| | | KTYTCNVDHKPSNTKVDKRVESKYGPPCPPCPAPEFLGGP |
| | | SVFLFPPKPKDTLMISRTPEVTCVVVDVSQEDPEVQFNWY |
| | | VDGVEVHNAKTKPREEQFNSTYRVVSVLTVLHQDWLNG |
| | | KEYKCKVSNKGLPSSIEKTISKAKGQPREPQVYTLPPSQEE |
| | | MTKNQVSLTCLVKGFYPSDIAVEWESNGQPENNYKTTPPV |
| | | LDSDGSFFLYSRLTVDKSRWQEGNVFSCSVMHEALHNHY |
| | | TQKSLSLSLG |
| SEQ ID NO: 3062 | DNA | GAAGTGCAGCTGGTGCAGTCAGGCGCCGAAGTGAAGAA |
| | heavy | ACCCGGCGCTACCGTGAAGATTAGCTGTAAAGTCTCAG |
| | chain | GCTACACCTTCACTAGCTACTGGATGTACTGGGTCCGAC |
| | | AGGCTAGAGGGCAAAGACTGGAGTGGATCGGTAGAATC |
| | | GACCCTAATAGCGGCTCTACTAAGTATAACGAGAAGTT |
| | | TAAGAATAGGTTCACTATTAGTAGGGATAACTCTAAGA |
| | | ACACCCTGTACCTGCAGATGAATAGCCTGAGAGCCGAG |
| | | GACACCGCCGTCTACTACTGCGCTAGAGACTATAGAAA |
| | | GGGCCTGTACGCTATGGACTACTGGGGTCAAGGCACTA |
| | | CCGTGACCGTGTCTTCAGCTAGCACTAAGGGCCCGTCCG |
| | | TGTTCCCCCTGGCACCTTGTAGCCGGAGCACTAGCGAAT |
| | | CCACCGCTGCCCTCGGCTGCCTGGTCAAGGATTACTTCC |
| | | CGGAGCCCGTGACCGTGTCCTGGAACAGCGGAGCCCTG |
| | | ACCTCCGGAGTGCACACCTTCCCCGCTGTGCTGCAGAGC |
| | | TCCGGGCTGTACTCGCTGTCGTCGGTGGTCACGGTGCCT |
| | | TCATCTAGCCTGGGTACCAAGACCTACACTTGCAACGTG |
| | | GACCACAAGCCTTCCAACACTAAGGTGGACAAGCGCGT |
| | | CGAATCGAAGTACGGCCCACCGTGCCCGCCTTGTCCCG |
| | | CGCCGGAGTTCCTCGGCGGTCCCTCGGTCTTTCTGTTCC |
| | | CACCGAAGCCCAAGGACACTTTGATGATTTCCCGCACC |
| | | CCTGAAGTGACATGCGTGGTCGTGGACGTGTCACAGGA |
| | | AGATCCGGAGGTGCAGTTCAATTGGTACGTGGATGGCG |
| | | TCGAGGTGCACAACGCCAAAACCAAGCCGAGGGAGGA |
| | | GCAGTTCAACTCCACTTACCGCGTCGTGTCCGTGCTGAC |
| | | GGTGCTGCATCAGGACTGGCTGAACGGGAAGGAGTACA |
| | | AGTGCAAAGTGTCCAACAAGGGACTTCCTAGCTCAATC |
| | | GAAAAGACCATCTCGAAAGCCAAGGGACAGCCCCGGG |
| | | AACCCCAAGTGTATACCCTGCCACCGAGCCAGGAAGAA |
| | | ATGACTAAGAACCAAGTCTCATTGACTTGCCTTGTGAAG |
| | | GGCTTCTACCCATCGGATATCGCCGTGGAATGGGAGTC |
| | | CAACGGCCAGCCGGAAAACAACTACAAGACCACCCCTC |
| | | CGGTGCTGGACTCAGACGGATCCTTCTTCCTCTACTCGC |
| | | GGCTGACCGTGGATAAGAGCAGATGGCAGGAGGGAAA |
| | | TGTGTTCAGCTGTTCTGTGATGCATGAAGCCCTGCACAA |
| | | CCACTACACTCAGAAGTCCCTGTCCCTCTCCCTGGGA |
| BAP058-Clone O LC | | |
| SEQ ID NO: 3056 | LCDR1 | KASQDVGTAVA |
| (Kabat) | | |
| SEQ ID NO: 3057 | LCDR2 | WASTRHT |
| (Kabat) | | |
| SEQ ID NO: 3058 | LCDR3 | QQYNSYPLT |
| (Kabat) | | |
| SEQ ID NO: 3059 | LCDR1 | SQDVGTA |
| (Chothia) | | |
| SEQ ID NO: | LCDR2 | WAS |
| 3060(Chothia) | | |
| SEQ ID NO: 3061 | LCDR3 | YNSYPL |
| (Chothia) | | |
| SEQ ID NO: 3063 | VL | AIQLTQSPSSLSASVGDRVTITCKASQDVGTAVAWYLQKP |
| | | GQSPQLLIYWASTRHTGVPSRFSGSGSGTDFTFTISSLEAED |
| | | AATYYCQQYNSYPLTFGQGTKVEIK |
| SEQ ID NO: 3064 | DNA | GCTATTCAGCTGACTCAGTCACCTAGTAGCCTGAGCGCT |
| | VL | AGTGTGGGCGATAGAGTGACTATCACCTGTAAAGCCTC |
| | | TCAGGACGTGGGCACCGCCGTGGCCTGGTATCTGCAGA |
| | | AGCCTGGTCAATCACCTCAGCTGCTGATCTACTGGGCCT |
| | | CTACTAGACACACCGGCGTGCCCTCTAGGTTTAGCGGTA |
| | | GCGGTAGTGGCACCGACTTCACCTTCACTATCTCTTCAC |
| | | TGGAAGCCGAGGACGCCGCTACCTACTACTGTCAGCAG |
| | | TATAATAGCTACCCCCTGACCTTCGGTCAAGGCACTAAG |
| | | GTCGAGATTAAG |
| SEQ ID NO: 3065 | Light | AIQLTQSPSSLSASVGDRVTITCKASQDVGTAVAWYLQKP |
| | chain | GQSPQLLIYWASTRHTGVPSRFSGSGSGTDFTFTISSLEAED |
| | | AATYYCQQYNSYPLTFGQGTKVEIKRTVAAPSVFIFPPSDE |
| | | QLKSGTASVVCLLNNFYPREAKVQWKVDNALQSGNSQES |
| | | VTEQDSKDSTYSLSSTLTLSKADYEKHKVYACEVTHQGLS |
| | | SPVTKSFNRGEC |
| SEQ ID NO: 3066 | DNA | GCTATTCAGCTGACTCAGTCACCTAGTAGCCTGAGCGCT |
| | light | AGTGTGGGCGATAGAGTGACTATCACCTGTAAAGCCTC |
| | chain | TCAGGACGTGGGCACCGCCGTGGCCTGGTATCTGCAGA |
| | | AGCCTGGTCAATCACCTCAGCTGCTGATCTACTGGGCCT |
| | | CTACTAGACACACCGGCGTGCCCTCTAGGTTTAGCGGTA |
| | | GCGGTAGTGGCACCGACTTCACCTTCACTATCTCTTCAC |
| | | TGGAAGCCGAGGACGCCGCTACCTACTACTGTCAGCAG |
| | | TATAATAGCTACCCCCTGACCTTCGGTCAAGGCACTAAG |
| | | GTCGAGATTAAGCGTACGGTGGCCGCTCCCAGCGTGTT |
| | | CATCTTCCCCCCCAGCGACGAGCAGCTGAAGAGCGGCA |
| | | CCGCCAGCGTGGTGTGCCTGCTGAACAACTTCTACCCCC |
| | | GGGAGGCCAAGGTGCAGTGGAAGGTGGACAACGCCCT |
| | | GCAGAGCGGCAACAGCCAGGAGAGCGTCACCGAGCAG |
| | | GACAGCAAGGACTCCACCTACAGCCTGAGCAGCACCCT |
| | | GACCCTGAGCAAGGCCGACTACGAGAAGCATAAGGTGT |
| | | ACGCCTGCGAGGTGACCCACCAGGGCCTGTCCAGCCCC |
| | | GTGACCAAGAGCTTCAACAGGGGCGAGTGC |
| BAP058-Clone N HC | | |
| SEQ ID NO: 3048 | HCDR1 | SYWMY |
| (Kabat) | | |
| SEQ ID NO: 3049 | HCDR2 | RIDPNSGSTKYNEKFKN |
| (Kabat) | | |
| SEQ ID NO: 3050 | HCDR3 | DYRKGLYAMDY |
| (Kabat) | | |
| SEQ ID NO: | HCDR1 | GYTFTSY |
| 3051(Chothia) | | |
| SEQ ID NO: | HCDR2 | DPNSGS |
| 3052(Chothia) | | |
| SEQ ID NO: 3050 | HCDR3 | DYRKGLYAMDY |
| (Chothia) | | |
| SEQ ID NO: 3067 | VH | EVQLVQSGAEVKKPGATVKISCKVSGYTFTSYWMYWVR |
| | | QATGQGLEWMGRIDPNSGSTKYNEKFKNRVTITADKSTST |
| | | AYMELSSLRSEDTAVYYCARDYRKGLYAMDYWGQGTTV |
| | | TVSS |
| SEQ ID NO: 3068 | DNA | GAAGTGCAGCTGGTGCAGTCAGGCGCCGAAGTGAAGAA |
| | VH | ACCCGGCGCTACCGTGAAGATTAGCTGTAAAGTCTCAG |
| | | GCTACACCTTCACTAGCTACTGGATGTACTGGGTCCGAC |
| | | AGGCTACCGGTCAAGGCCTGGAGTGGATGGGTAGAATC |
| | | GACCCTAATAGCGGCTCTACTAAGTATAACGAGAAGTT |
| | | TAAGAATAGAGTGACTATCACCGCCGATAAGTCTACTA |
| | | GCACCGCCTATATGGAACTGTCTAGCCTGAGATCAGAG |
| | | GACACCGCCGTCTACTACTGCGCTAGAGACTATAGAAA |
| | | GGGCCTGTACGCTATGGACTACTGGGGTCAAGGCACTA |
| | | CCGTGACCGTGTCTTCA |
| SEQ ID NO: 3069 | Heavy | EVQLVQSGAEVKKPGATVKISCKVSGYTFTSYWMYWVR |
| | chain | QATGQGLEWMGRIDPNSGSTKYNEKFKNRVTITADKSTST |
| | | AYMELSSLRSEDTAVYYCARDYRKGLYAMDYWGQGTTV |
| | | TVSSASTKGPSVFPLAPCSRSTSESTAALGCLVKDYFPEPV |
| | | TVSWNSGALTSGVHTFPAVLQSSGLYSLSSVVTVPSSSLGT |
| | | KTYTCNVDHKPSNTKVDKRVESKYGPPCPPCPAPEFLGGP |
| | | SVFLFPPKPKDTLMISRTPEVTCVVVDVSQEDPEVQFNWY |
| | | VDGVEVHNAKTKPREEQFNSTYRVVSVLTVLHQDWLNG |
| | | KEYKCKVSNKGLPSSIEKTISKAKGQPREPQVYTLPPSQEE |
| | | MTKNQVSLTCLVKGFYPSDIAVEWESNGQPENNYKTTPPV |
| | | LDSDGSFFLYSRLTVDKSRWQEGNVFSCSVMHEALHNHY |
| | | TQKSLSLSLG |
| SEQ ID NO: 3070 | DNA | GAAGTGCAGCTGGTGCAGTCAGGCGCCGAAGTGAAGAA |
| | heavy | ACCCGGCGCTACCGTGAAGATTAGCTGTAAAGTCTCAG |
| | chain | GCTACACCTTCACTAGCTACTGGATGTACTGGGTCCGAC |
| | | AGGCTACCGGTCAAGGCCTGGAGTGGATGGGTAGAATC |
| | | GACCCTAATAGCGGCTCTACTAAGTATAACGAGAAGTT |
| | | TAAGAATAGAGTGACTATCACCGCCGATAAGTCTACTA |
| | | GCACCGCCTATATGGAACTGTCTAGCCTGAGATCAGAG |
| | | GACACCGCCGTCTACTACTGCGCTAGAGACTATAGAAA |
| | | GGGCCTGTACGCTATGGACTACTGGGGTCAAGGCACTA |
| | | CCGTGACCGTGTCTTCAGCTAGCACTAAGGGCCCGTCCG |
| | | TGTTCCCCCTGGCACCTTGTAGCCGGAGCACTAGCGAAT |
| | | CCACCGCTGCCCTCGGCTGCCTGGTCAAGGATTACTTCC |
| | | CGGAGCCCGTGACCGTGTCCTGGAACAGCGGAGCCCTG |
| | | ACCTCCGGAGTGCACACCTTCCCCGCTGTGCTGCAGAGC |
| | | TCCGGGCTGTACTCGCTGTCGTCGGTGGTCACGGTGCCT |
| | | TCATCTAGCCTGGGTACCAAGACCTACACTTGCAACGTG |
| | | GACCACAAGCCTTCCAACACTAAGGTGGACAAGCGCGT |
| | | CGAATCGAAGTACGGCCCACCGTGCCCGCCTTGTCCCG |
| | | CGCCGGAGTTCCTCGGCGGTCCCTCGGTCTTTCTGTTCC |
| | | CACCGAAGCCCAAGGACACTTTGATGATTTCCCGCACC |
| | | CCTGAAGTGACATGCGTGGTCGTGGACGTGTCACAGGA |
| | | AGATCCGGAGGTGCAGTTCAATTGGTACGTGGATGGCG |
| | | TCGAGGTGCACAACGCCAAAACCAAGCCGAGGGAGGA |
| | | GCAGTTCAACTCCACTTACCGCGTCGTGTCCGTGCTGAC |
| | | GGTGCTGCATCAGGACTGGCTGAACGGGAAGGAGTACA |
| | | AGTGCAAAGTGTCCAACAAGGGACTTCCTAGCTCAATC |
| | | GAAAAGACCATCTCGAAAGCCAAGGGACAGCCCCGGG |
| | | AACCCCAAGTGTATACCCTGCCACCGAGCCAGGAAGAA |
| | | ATGACTAAGAACCAAGTCTCATTGACTTGCCTTGTGAAG |
| | | GGCTTCTACCCATCGGATATCGCCGTGGAATGGGAGTC |
| | | CAACGGCCAGCCGGAAAACAACTACAAGACCACCCCTC |
| | | CGGTGCTGGACTCAGACGGATCCTTCTTCCTCTACTCGC |
| | | GGCTGACCGTGGATAAGAGCAGATGGCAGGAGGGAAA |
| | | TGTGTTCAGCTGTTCTGTGATGCATGAAGCCCTGCACAA |
| | | CCACTACACTCAGAAGTCCCTGTCCCTCTCCCTGGGA |
| BAP058-Clone N LC | | |
| SEQ ID NO: 3056 | LCDR1 | KASQDVGTAVA |
| (Kabat) | | |
| SEQ ID NO: 3057 | LCDR2 | WASTRHT |
| (Kabat) | | |
| SEQ ID NO: 3058 | LCDR3 | QQYNSYPLT |
| (Kabat) | | |
| SEQ ID NO: 3059 | LCDR1 | SQDVGTA |
| (Chothia) | | |
| SEQ ID NO: | LCDR2 | WAS |
| 3060(Chothia) | | |
| SEQ ID NO: 3061 | LCDR3 | YNSYPL |
| (Chothia) | | |
| SEQ ID NO: 3071 | VL | DVVMTQSPLSLPVTLGQPASISCKASQDVGTAVAWYQQK |
| | | PGQAPRLLIYWASTRHTGVPSRFSGSGSGTEFTLTISSLQPD |
| | | DFATYYCQQYNSYPLTFGQGTKVEIK |
| SEQ ID NO: 3072 | DNA | GACGTCGTGATGACTCAGTCACCCCTGAGCCTGCCCGTG |
| | VL | ACCCTGGGGCAGCCCGCCTCTATTAGCTGTAAAGCCTCT |
| | | CAGGACGTGGGCACCGCCGTGGCCTGGTATCAGCAGAA |
| | | GCCAGGGCAAGCCCCTAGACTGCTGATCTACTGGGCCT |
| | | CTACTAGACACACCGGCGTGCCCTCTAGGTTTAGCGGTA |
| | | GCGGTAGTGGCACCGAGTTCACCCTGACTATCTCTTCAC |
| | | TGCAGCCCGACGACTTCGCTACCTACTACTGTCAGCAGT |
| | | ATAATAGCTACCCCCTGACCTTCGGTCAAGGCACTAAG |
| | | GTCGAGATTAAG |
| SEQ ID NO: 3073 | Light | DVVMTQSPLSLPVTLGQPASISCKASQDVGTAVAWYQQK |
| | chain | PGQAPRLLIYWASTRHTGVPSRFSGSGSGTEFTLTISSLQPD |
| | | DFATYYCQQYNSYPLTFGQGTKVEIKRTVAAPSVFIFPPSD |
| | | EQLKSGTASVVCLLNNFYPREAKVQWKVDNALQSGNSQE |
| | | SVTEQDSKDSTYSLSSTLTLSKADYEKHKVYACEVTHQGL |
| | | SSPVTKSFNRGEC |
| SEQ ID NO: 3074 | DNA | GACGTCGTGATGACTCAGTCACCCCTGAGCCTGCCCGTG |
| | light | ACCCTGGGGCAGCCCGCCTCTATTAGCTGTAAAGCCTCT |
| | chain | CAGGACGTGGGCACCGCCGTGGCCTGGTATCAGCAGAA |
| | | GCCAGGGCAAGCCCCTAGACTGCTGATCTACTGGGCCT |
| | | CTACTAGACACACCGGCGTGCCCTCTAGGTTTAGCGGTA |
| | | GCGGTAGTGGCACCGAGTTCACCCTGACTATCTCTTCAC |
| | | TGCAGCCCGACGACTTCGCTACCTACTACTGTCAGCAGT |
| | | ATAATAGCTACCCCCTGACCTTCGGTCAAGGCACTAAG |
| | | GTCGAGATTAAGCGTACGGTGGCCGCTCCCAGCGTGTT |
| | | CATCTTCCCCCCCAGCGACGAGCAGCTGAAGAGCGGCA |
| | | CCGCCAGCGTGGTGTGCCTGCTGAACAACTTCTACCCCC |
| | | GGGAGGCCAAGGTGCAGTGGAAGGTGGACAACGCCCT |
| | | GCAGAGCGGCAACAGCCAGGAGAGCGTCACCGAGCAG |
| | | GACAGCAAGGACTCCACCTACAGCCTGAGCAGCACCCT |
| | | GACCCTGAGCAAGGCCGACTACGAGAAGCATAAGGTGT |
| | | ACGCCTGCGAGGTGACCCACCAGGGCCTGTCCAGCCCC |
| | | GTGACCAAGAGCTTCAACAGGGGCGAGTGC |
| BAP058-Clone O HC | | |
| SEQ ID NO: 3075 | HCDR1 | agctactggatgtac |
| (Kabat) | | |
| SEQ ID NO: 3076 | HCDR2 | agaatcgaccctaatagcggctctactaagtataacgagaagtttaagaat |
| (Kabat) | | |
| SEQ ID NO: 3077 | HCDR3 | gactatagaaagggcctgtacgctatggactac |
| (Kabat) | | |
| SEQ ID NO: 3078 | HCDR1 | ggctacaccttcactagctac |
| (Chothia) | | |
| SEQ ID NO: 3079 | HCDR2 | gaccctaatagcggctct |
| (Chothia) | | |
| SEQ ID NO: 3077 | HCDR3 | gactatagaaagggcctgtacgctatggactac |
| (Chothia) | | |
| BAP058-Clone O LC | | |
| SEQ ID NO: 3080 | LCDR1 | aaagcctctcaggacgtgggcaccgccgtggcc |
| (Kabat) | | |
| SEQ ID NO: 3081 | LCDR2 | tgggcctctactagacacacc |
| (Kabat) | | |
| SEQ ID NO: 3082 | LCDR3 | cagcagtataatagctaccccctgacc |
| (Kabat) | | |
| SEQ ID NO: | LCDR1 | tctcaggacgtgggcaccgcc |
| 3083(Chothia) | | |
| SEQ ID NO: 3084 | LCDR2 | tgggcctct |
| (Chothia) | | |
| SEQ ID NO: | LCDR3 | tataatagctaccccctg |
| 3085(Chothia) | | |
| BAP058-Clone N HC | | |
| SEQ ID NO: 3075 | HCDR1 | agctactggatgtac |
| (Kabat) | | |
| SEQ ID NO: 3076 | HCDR2 | agaatcgaccctaatagcggctctactaagtataacgagaagtttaagaat |
| (Kabat) | | |
| SEQ ID NO: 3077 | HCDR3 | gactatagaaagggcctgtacgctatggactac |
| (Kabat) | | |
| SEQ ID NO: 3078 | HCDR1 | ggctacaccttcactagctac |
| (Chothia) | | |
| SEQ ID NO: 3079 | HCDR2 | gaccctaatagcggctct |
| (Chothia) | | |
| SEQ ID NO: 3077 | HCDR3 | gactatagaaagggcctgtacgctatggactac |
| (Chothia) | | |
| BAP058-Clone N LC | | |
| SEQ ID NO: 3080 | LCDR1 | aaagcctctcaggacgtgggcaccgccgtggcc |
| (Kabat) | | |
| SEQ ID NO: 3081 | LCDR2 | tgggcctctactagacacacc |
| (Kabat) | | |
| SEQ ID NO: 3082 | LCDR3 | cagcagtataatagctaccccctgacc |
| (Kabat) | | |
| SEQ ID NO: 3083 | LCDR1 | tctcaggacgtgggcaccgcc |
| (Chothia) | | |
| SEQ ID NO: 3084 | LCDR2 | tgggcctct |
| (Chothia) | | |
| SEQ ID NO: 3085 | LCDR3 | tataatagctaccccctg |
| (Chothia) | | |

### Other Exemplary PD-L1 Inhibitors

[0894] In some embodiments, the PD-L1 inhibitor is anti-PD-L1 antibody. In some embodiments, the anti-PD-L1 inhibitor is selected from YW243.55.S70, MPDL3280A, MEDI-4736, or MDX-1105MSB-0010718C (also referred to as A09-246-2) disclosed in, e.g., WO 2013/0179174, and having a sequence disclosed herein (or a sequence substantially identical or similar thereto, e.g., a sequence at least 85%, 90%, 95% identical or higher to the sequence specified).

[0895] In one embodiment, the PD-L1 inhibitor is MDX-1105. MDX-1105, also known as BMS-936559, is an anti-PD-L1 antibody described in PCT Publication No. WO 2007/005874.

[0896] In one embodiment, the PD-L1 inhibitor is YW243.55.S70. The YW243.55.S70 antibody is an anti-PD-L1 described in PCT Publication No. WO 2010/077634.

[0897] In one embodiment, the PD-L1 inhibitor is MDPL3280A (Genentech/Roche) also known as Atezolizumabm, RG7446, R05541267, YW243.55.S70, or TECENTRIQ™. MDPL3280A is a human Fc optimized IgG1 monoclonal antibody that binds to PD-L1. MDPL3280A and other human monoclonal antibodies to PD-L1 are disclosed in U.S. Pat. No. 7,943,743 and U.S Publication No.: 20120039906 incorporated by reference in its entirety. In one embodiment, the anti-PD-L1 antibody molecule comprises one or more of the CDR sequences (or collectively all of the CDR sequences), the heavy chain or light chain variable region sequence, or the heavy chain or light chain sequence of Atezolizumab, e.g., as disclosed in Table 17.

[0898] In other embodiments, the PD-L2 inhibitor is AMP-224. AMP-224 is a PD-L2 Fc fusion soluble receptor that blocks the interaction between PD1 and B7-H1 (B7-DCIg; Amplimmune; e.g., disclosed in PCT Publication Nos. WO2010/027827 and WO2011/066342).

[0899] In one embodiment, the PD-L1 inhibitor is an anti-PD-L1 antibody molecule. In one embodiment, the anti-PD-L1 antibody molecule is Avelumab (Merck Serono and Pfizer), also known as MSB0010718C. Avelumab and other anti-PD-L1 antibodies are disclosed in WO 2013/079174, incorporated by reference in its entirety. In one embodiment, the anti-PD-L1 antibody molecule comprises one or more of the CDR sequences (or collectively all of the CDR sequences), the heavy chain or light chain variable region sequence, or the heavy chain or light chain sequence of Avelumab, e.g., as disclosed in Table 17.

[0900] In one embodiment, the anti-PD-L1 antibody molecule is Durvalumab (MedImmune/AstraZeneca), also known as MEDI4736. Durvalumab and other anti-PD-L1 antibodies are disclosed in U.S. Pat. No. 8,779,108, incorporated by reference in its entirety. In one embodiment, the anti-PD-L1 antibody molecule comprises one or more of the CDR sequences (or collectively all of the CDR sequences), the heavy chain or light chain variable region sequence, or the heavy chain or light chain sequence of Durvalumab, e.g., as disclosed in Table 17.

[0901] In one embodiment, the anti-PD-L1 antibody molecule is BMS-936559 (Bristol-Myers Squibb), also known as MDX-1105 or 12A4. BMS-936559 and other anti-PD-L1 antibodies are disclosed in U.S. Pat. No. 7,943,743 and WO 2015/081158, incorporated by reference in their entirety. In one embodiment, the anti-PD-L1 antibody molecule comprises one or more of the CDR sequences (or collectively all of the CDR sequences), the heavy chain or light chain variable region sequence, or the heavy chain or light chain sequence of BMS-936559, e.g., as disclosed in Table 17.

[0902] Further known anti-PD-L1 antibodies include those described, e.g., in WO 2015/181342, WO 2014/100079, WO 2016/000619, WO 2014/022758, WO 2014/055897, WO 2015/061668, WO 2013/079174, WO 2012/145493, WO 2015/112805, WO 2015/109124, WO 2015/195163, U.S. Pat. Nos. 8,168,179, 8,552,154, 8,460,927, and 9,175,082, incorporated by reference in their entirety.

[0903] In one embodiment, the anti-PD-L1 antibody is an antibody that competes for binding with, and/or binds to the same epitope on PD-L1 as, one of the anti-PD-L1 antibodies described herein.

TABLE 17
Amino acid sequences of other exemplary anti-PD-L1 antibody molecules

| | | |
|---|---|---|
| Atezolizumab | | |
| SEQ ID NO: | Heavy | EVQLVESGGGLVQPGGSLRLSCAASGFTFSDSWIHWVRQAPGKGLE |
| 3086 | chain | WVAWISPYGGSTYYADSVKGRFTISADTSKNTAYLQMNSLRAEDTA |
| | | VYYCARRHWPGGFDYWGQGTLVTVSSASTKGPSVFPLAPSSKSTSG |
| | | GTAALGCLVKDYFPEPVTVSWNSGALTSGVHTFPAVLQSSGLYSLSS |
| | | VVTVPSSSLGTQTYICNVNHKPSNTKVDKKVEPKSCDKTHTCPPCPA |
| | | PELLGGPSVFLFPPKPKDTLMISRTPEVTCVVVDVSHEDPEVKFNWY |
| | | VDGVEVHNAKTKPREEQYASTYRVVSVLTVLHQDWLNGKEYKCK |
| | | VSNKALPAPIEKTISKAKGQPREPQVYTLPPSREEMTKNQVSLTCLVK |
| | | GFYPSDIAVEWESNGQPENNYKTTPPVLDSDGSFFLYSKLTVDKSRW |
| | | QQGNVFSCSVMHEALHNHYTQKSLSLSPGK |
| SEQ ID NO: | Light | DIQMTQSPSSLSASVGDRVTITCRASQDVSTAVAWYQQKPGKAPKL |
| 3087 | chain | LIYSASFLYSGVPSRFSGSGSGTDFTLTISSLQPEDFATYYCQQYLYHP |
| | | ATFGQGTKVEIKRTVAAPSVFIFPPSDEQLKSGTASVVCLLNNFYPRE |
| | | AKVQWKVDNALQSGNSQESVTEQDSKDSTYSLSSTLTLSKADYEKH |
| | | KVYACEVTHQGLSSPVTKSFNRGEC |
| Avelumab | | |
| SEQ ID NO: | Heavy | EVQLLESGGGLVQPGGSLRLSCAASGFTFSSYIMMWVRQAPGKGLE |
| 3088 | chain | WVSSIYPSGGITFYADTVKGRFTISRDNSKNTLYLQMNSLRAEDTAV |
| | | YYCARIKLGTVTTVDYWGQGTLVTVSSASTKGPSVFPLAPSSKSTSG |
| | | GTAALGCLVKDYFPEPVTVSWNSGALTSGVHTFPAVLQSSGLYSLSS |
| | | VVTVPSSSLGTQTYICNVNHKPSNTKVDKKVEPKSCDKTHTCPPCPA |
| | | PELLGGPSVFLFPPKPKDTLMISRTPEVTCVVVDVSHEDPEVKFNWY |
| | | VDGVEVHNAKTKPREEQYNSTYRVVSVLTVLHQDWLNGKEYKCK |
| | | VSNKALPAPIEKTISKAKGQPREPQVYTLPPSRDELTKNQVSLTCLVK |
| | | GFYPSDIAVEWESNGQPENNYKTTPPVLDSDGSFFLYSKLTVDKSRW |
| | | QQGNVFSCSVMHEALHNHYTQKSLSLSPGK |
| SEQ ID NO: | Light | QSALTQPASVSGSPGQSITISCTGTSSDVGGYNYVSWYQQHPGKAPK |
| 3089 | chain | LMIYDVSNRPSGVSNRFSGSKSGNTASLTISGLQAEDEADYYCSSYTS |
| | | SSTRVFGTGTKVTVLGQPKANPTVTLFPPSSEELQANKATLVCLISDF |
| | | YPGAVTVAWKADGSPVKAGVETTKPSKQSNNKYAASSYLSLTPEQ |
| | | WKSHRSYSCQVTHEGSTVEKTVAPTECS |
| Durvalumab | | |
| SEQ ID NO: | Heavy | EVQLVESGGGLVQPGGSLRLSCAASGFTFSRYWMSWVRQAPGKGL |
| 3090 | chain | EWVANIKQDGSEKYYVDSVKGRFTISRDNAKNSLYLQMNSLRAEDT |
| | | AVYYCAREGGWFGELAFDYWGQGTLVTVSSASTKGPSVFPLAPSSK |
| | | STSGGTAALGCLVKDYFPEPVTVSWNSGALTSGVHTFPAVLQSSGLY |
| | | SLSSVVTVPSSSLGTQTYICNVNHKPSNTKVDKRVEPKSCDKTHTCPP |
| | | CPAPEFEGGPSVFLFPPKPKDTLMISRTPEVTCVVVDVSHEDPEVKFN |
| | | WYVDGVEVHNAKTKPREEQYNSTYRVVSVLTVLHQDWLNGKEYK |
| | | CKVSNKALPASIEKTISKAKGQPREPQVYTLPPSREEMTKNQVSLTCL |
| | | VKGFYPSDIAVEWESNGQPENNYKTTPPVLDSDGSFFLYSKLTVDKS |
| | | RWQQGNVFSCSVMHEALHNHYTQKSLSLSPGK |
| SEQ ID NO: | Light | EIVLTQSPGTLSLSPGERATLSCRASQRVSSSYLAWYQQKPGQAPRLL |
| 3091 | chain | IYDASSRATGIPDRFSGSGSGTDFTLTISRLEPEDFAVYYCQQYGSLP |
| | | WTFGQGTKVEIKRTVAAPSVFIFPPSDEQLKSGTASVVCLLNNFYPRE |
| | | AKVQWKVDNALQSGNSQESVTEQDSKDSTYSLSSTLTLSKADYEKH |
| | | KVYACEVTHQGLSSPVTKSFNRGEC |
| BMS-936559 | | |
| SEQ ID NO: | VH | QVQLVQSGAEVKKPGSSVKVSCKTSGDTFSTYAISWVRQAPGQGLE |
| 3092 | | WMGGIIPIFGKAHYAQKFQGRVTITADESTSTAYMELSSLRSEDTAV |
| | | YFCARKFHFVSGSPFGMDVWGQGTTVTVSS |
| SEQ ID NO: | VL | EIVLTQSPATLSLSPGERATLSCRASQSVSSYLAWYQQKPGQAPRLLI |
| 3093 | | YDASNRATGIPARFSGSGSGTDFTLTISSLEPEDFAVYYCQQRSNWPT |
| | | FGQGTKVEIK |

### LAG-3 Inhibitors

[0904] In some embodiments, the ZBTB32 inhibitor, or a pharmaceutically acceptable salt, hydrate, solvate, prodrug, stereoisomer, or tautomer thereof, of the present disclosure are used in combination with a LAG-3 inhibitor to treat a disease, e.g., cancer. In some embodiments, the LAG-3 inhibitor is selected from LAG525 (Novartis), BMS-986016 (Bristol-Myers Squibb), or TSR-033 (Tesaro).

[0905] Exemplary LAG-3 Inhibitors

[0906] In one embodiment, the LAG-3 inhibitor is an anti-LAG-3 antibody molecule. In one embodiment, the LAG-3 inhibitor is an anti-LAG-3 antibody molecule as disclosed in US 2015/0259420, published on Sep. 17, 2015, entitled “Antibody Molecules to LAG-3 and Uses Thereof,” incorporated by reference in its entirety.

[0907] In one embodiment, the anti-LAG-3 antibody molecule comprises at least one, two, three, four, five or six complementarity determining regions (CDRs) (or collectively all of the CDRs) from a heavy and light chain variable region comprising an amino acid sequence shown in Table 18 (e.g., from the heavy and light chain variable region sequences of BAP050-Clone I or BAP050-Clone J disclosed in Table 18), or encoded by a nucleotide sequence shown in Table 18. In some embodiments, the CDRs are according to the Kabat definition (e.g., as set out in Table 18). In some embodiments, the CDRs are according to the Chothia definition (e.g., as set out in Table 18). In some embodiments, the CDRs are according to the combined CDR definitions of both Kabat and Chothia (e.g., as set out in Table 18). In one embodiment, the combination of Kabat and Chothia CDR of VH CDR1 comprises the amino acid sequence GFTLTNYGMN (SEQ ID NO: 3158). In one embodiment, one or more of the CDRs (or collectively all of the CDRs) have one, two, three, four, five, six or more changes, e.g., amino acid substitutions (e.g., conservative amino acid substitutions) or deletions, relative to an amino acid sequence shown in Table 18, or encoded by a nucleotide sequence shown in Table 18.

[0908] In one embodiment, the anti-LAG-3 antibody molecule comprises a heavy chain variable region (VH) comprising a VHCDR1 amino acid sequence of SEQ ID NO: 3094, a VHCDR2 amino acid sequence of SEQ ID NO: 3095, and a VHCDR3 amino acid sequence of SEQ ID NO: 3096; and a light chain variable region (VL) comprising a VLCDR1 amino acid sequence of SEQ ID NO: 3103, a VLCDR2 amino acid sequence of SEQ ID NO: 3104, and a VLCDR3 amino acid sequence of SEQ ID NO: 3105, each disclosed in Table 18.

[0909] In one embodiment, the anti-LAG-3 antibody molecule comprises a VH comprising a VHCDR1 encoded by the nucleotide sequence of SEQ ID NO: 3129 or 3130, a VHCDR2 encoded by the nucleotide sequence of SEQ ID NO: 3131 or 3132, and a VHCDR3 encoded by the nucleotide sequence of SEQ ID NO: 3133 or 3134; and a VL comprising a VLCDR1 encoded by the nucleotide sequence of SEQ ID NO: 3139 or 3140, a VLCDR2 encoded by the nucleotide sequence of SEQ ID NO: 3141 or 3142, and a VLCDR3 encoded by the nucleotide sequence of SEQ ID NO: 3143 or 3144, each disclosed in Table 18. In one embodiment, the anti-LAG-3 antibody molecule comprises a VH comprising a VHCDR1 encoded by the nucleotide sequence of SEQ ID NO: 3150 or 3130, a VHCDR2 encoded by the nucleotide sequence of SEQ ID NO: 3151 or 3132, and a VHCDR3 encoded by the nucleotide sequence of SEQ ID NO: 3152 or 3134; and a VL comprising a VLCDR1 encoded by the nucleotide sequence of SEQ ID NO: 3139 or 3140, a VLCDR2 encoded by the nucleotide sequence of SEQ ID NO: 3141 or 3142, and a VLCDR3 encoded by the nucleotide sequence of SEQ ID NO: 3143 or 3144, each disclosed in Table 18.

[0910] In one embodiment, the anti-LAG-3 antibody molecule comprises a VH comprising the amino acid sequence of SEQ ID NO: 3099, or an amino acid sequence at least 85%, 90%, 95%, or 99% identical or higher to SEQ ID NO: 3099. In one embodiment, the anti-LAG-3 antibody molecule comprises a VL comprising the amino acid sequence of SEQ ID NO: 3111, or an amino acid sequence at least 85%, 90%, 95%, or 99% identical or higher to SEQ ID NO: 3111. In one embodiment, the anti-LAG-3 antibody molecule comprises a VH comprising the amino acid sequence of SEQ ID NO: 3117, or an amino acid sequence at least 85%, 90%, 95%, or 99% identical or higher to SEQ ID NO: 3117. In one embodiment, the anti-LAG-3 antibody molecule comprises a VL comprising the amino acid sequence of SEQ ID NO: 3123, or an amino acid sequence at least 85%, 90%, 95%, or 99% identical or higher to SEQ ID NO: 3123. In one embodiment, the anti-LAG-3 antibody molecule comprises a VH comprising the amino acid sequence of SEQ ID NO: 3099 and a VL comprising the amino acid sequence of SEQ ID NO: 3111. In one embodiment, the anti-LAG-3 antibody molecule comprises a VH comprising the amino acid sequence of SEQ ID NO: 3117 and a VL comprising the amino acid sequence of SEQ ID NO: 3123.

[0911] In one embodiment, the antibody molecule comprises a VH encoded by the nucleotide sequence of SEQ ID NO: 3100 or 3101, or a nucleotide sequence at least 85%, 90%, 95%, or 99% identical or higher to SEQ ID NO: 3100 or 3101. In one embodiment, the antibody molecule comprises a VL encoded by the nucleotide sequence of SEQ ID NO: 3112 or 3113, or a nucleotide sequence at least 85%, 90%, 95%, or 99% identical or higher to SEQ ID NO: 3112 or 3113. In one embodiment, the antibody molecule comprises a VH encoded by the nucleotide sequence of SEQ ID NO: 3118 or 3119, or a nucleotide sequence at least 85%, 90%, 95%, or 99% identical or higher to SEQ ID NO: 3118 or 3119. In one embodiment, the antibody molecule comprises a VL encoded by the nucleotide sequence of SEQ ID NO: 3124 or 3125, or a nucleotide sequence at least 85%, 90%, 95%, or 99% identical or higher to SEQ ID NO: 3124 or 3125. In one embodiment, the antibody molecule comprises a VH encoded by the nucleotide sequence of SEQ ID NO: 3100 or 3101 and a VL encoded by the nucleotide sequence of SEQ ID NO: 3112 or 3113. In one embodiment, the antibody molecule comprises a VH encoded by the nucleotide sequence of SEQ ID NO: 3118 or 3119 and a VL encoded by the nucleotide sequence of SEQ ID NO: 3124 or 3125.

[0912] In one embodiment, the anti-LAG-3 antibody molecule comprises a heavy chain comprising the amino acid sequence of SEQ ID NO: 3102, or an amino acid sequence at least 85%, 90%, 95%, or 99% identical or higher to SEQ ID NO: 3102. In one embodiment, the anti-LAG-3 antibody molecule comprises a light chain comprising the amino acid sequence of SEQ ID NO: 3114, or an amino acid sequence at least 85%, 90%, 95%, or 99% identical or higher to SEQ ID NO: 3114. In one embodiment, the anti-LAG-3 antibody molecule comprises a heavy chain comprising the amino acid sequence of SEQ ID NO: 3120, or an amino acid sequence at least 85%, 90%, 95%, or 99% identical or higher to SEQ ID NO: 3120. In one embodiment, the anti-LAG-3 antibody molecule comprises a light chain comprising the amino acid sequence of SEQ ID NO: 3126, or an amino acid sequence at least 85%, 90%, 95%, or 99% identical or higher to SEQ ID NO: 3126. In one embodiment, the anti-LAG-3 antibody molecule comprises a heavy chain comprising the amino acid sequence of SEQ ID NO: 3102 and a light chain comprising the amino acid sequence of SEQ ID NO: 3114. In one embodiment, the anti-LAG-3 antibody molecule comprises a heavy chain comprising the amino acid sequence of SEQ ID NO: 3120 and a light chain comprising the amino acid sequence of SEQ ID NO: 3126.

[0913] In one embodiment, the antibody molecule comprises a heavy chain encoded by the nucleotide sequence of SEQ ID NO: 3109 or 3110, or a nucleotide sequence at least 85%, 90%, 95%, or 99% identical or higher to SEQ ID NO: 3109 or 3110. In one embodiment, the antibody molecule comprises a light chain encoded by the nucleotide sequence of SEQ ID NO: 3115 or 3116, or a nucleotide sequence at least 85%, 90%, 95%, or 99% identical or higher to SEQ ID NO: 3115 or 3116. In one embodiment, the antibody molecule comprises a heavy chain encoded by the nucleotide sequence of SEQ ID NO: 3121 or 3122, or a nucleotide sequence at least 85%, 90%, 95%, or 99% identical or higher to SEQ ID NO: 3121 or 3122. In one embodiment, the antibody molecule comprises a light chain encoded by the nucleotide sequence of SEQ ID NO: 3127 or 3128, or a nucleotide sequence at least 85%, 90%, 95%, or 99% identical or higher to SEQ ID NO: 3127 or 3128. In one embodiment, the antibody molecule comprises a heavy chain encoded by the nucleotide sequence of SEQ ID NO: 3109 or 3110 and a light chain encoded by the nucleotide sequence of SEQ ID NO: 3115 or 3116. In one embodiment, the antibody molecule comprises a heavy chain encoded by the nucleotide sequence of SEQ ID NO: 3121 or 3122 and a light chain encoded by the nucleotide sequence of SEQ ID NO: 3127 or 3128.

[0914] The antibody molecules described herein can be made by vectors, host cells, and methods described in US 2015/0259420, incorporated by reference in its entirety.

TABLE 18
Amino acid and nucleotide sequences of exemplary
anti-LAG-3 antibody molecules

| | | |
|---|---|---|
| BAP050-Clone I HC | | |
| SEQ ID NO: 3094 | HCDR1 | NYGMN |
| (Kabat) | | |
| SEQ ID NO: 3095 | HCDR2 | WINTDTGEPTYADDFKG |
| (Kabat) | | |
| SEQ ID NO: 3096 | HCDR3 | NPPYYYGTNNAEAMDY |
| (Kabat) | | |
| SEQ ID NO: 3097 | HCDR1 | GFTLTNY |
| (Chothia) | | |
| SEQ ID NO: | HCDR2 | NTDTGE |
| 3098(Chothia) | | |
| SEQ ID NO: 3096 | HCDR3 | NPPYYYGTNNAEAMDY |
| (Chothia) | | |
| SEQ ID NO: 3099 | VH | QVQLVQSGAEVKKPGASVKVSCKASGFTLTNYGMNWVRQAR |
| | | GQRLEWIGWINTDTGEPTYADDFKGRFVFSLDTSVSTAYLQISS |
| | | LKAEDTAVYYCARNPPYYYGTNNAEAMDYWGQGTTVTVSS |
| SEQ ID NO: 3100 | DNA | CAAGTGCAGCTGGTGCAGTCGGGAGCCGAAGTGAAGAAGCC |
| | VH | TGGAGCCTCGGTGAAGGTGTCGTGCAAGGCATCCGGATTCA |
| | | CCCTCACCAATTACGGGATGAACTGGGTCAGACAGGCCCGG |
| | | GGTCAACGGCTGGAGTGGATCGGATGGATTAACACCGACAC |
| | | CGGGGAGCCTACCTACGCGGACGATTTCAAGGGACGGTTCG |
| | | TGTTCTCCCTCGACACCTCCGTGTCCACCGCCTACCTCCAAA |
| | | TCTCCTCACTGAAAGCGGAGGACACCGCCGTGTACTATTGC |
| | | GCGAGGAACCCGCCCTACTACTACGGAACCAACAACGCCGA |
| | | AGCCATGGACTACTGGGGCCAGGGCACCACTGTGACTGTGT |
| | | CCAGC |
| SEQ ID NO: 3101 | DNA | CAGGTGCAGCTGGTGCAGTCTGGCGCCGAAGTGAAGAAACC |
| | VH | TGGCGCCTCCGTGAAGGTGTCCTGCAAGGCCTCTGGCTTCAC |
| | | CCTGACCAACTACGGCATGAACTGGGTGCGACAGGCCAGGG |
| | | GCCAGCGGCTGGAATGGATCGGCTGGATCAACACCGACACC |
| | | GGCGAGCCTACCTACGCCGACGACTTCAAGGGCAGATTCGT |
| | | GTTCTCCCTGGACACCTCCGTGTCCACCGCCTACCTGCAGAT |
| | | CTCCAGCCTGAAGGCCGAGGATACCGCCGTGTACTACTGCG |
| | | CCCGGAACCCCCCTTACTACTACGGCACCAACAACGCCGAG |
| | | GCCATGGACTATTGGGGCCAGGGCACCACCGTGACCGTGTC |
| | | CTCT |
| SEQ ID NO: 3102 | Heavy | QVQLVQSGAEVKKPGASVKVSCKASGFTLTNYGMNWVRQAR |
| | chain | GQRLEWIGWINTDTGEPTYADDFKGRFVFSLDTSVSTAYLQISS |
| | | LKAEDTAVYYCARNPPYYYGTNNAEAMDYWGQGTTVTVSSA |
| | | STKGPSVFPLAPCSRSTSESTAALGCLVKDYFPEPVTVSWNSGA |
| | | LTSGVHTFPAVLQSSGLYSLSSVVTVPSSSLGTKTYTCNVDHKP |
| | | SNTKVDKRVESKYGPPCPPCPAPEFLGGPSVFLFPPKPKDTLMIS |
| | | RTPEVTCVVVDVSQEDPEVQFNWYVDGVEVHNAKTKPREEQF |
| | | NSTYRVVSVLTVLHQDWLNGKEYKCKVSNKGLPSSIEKTISKA |
| | | KGQPREPQVYTLPPSQEEMTKNQVSLTCLVKGFYPSDIAVEWE |
| | | SNGQPENNYKTTPPVLDSDGSFFLYSRLTVDKSRWQEGNVFSC |
| | | SVMHEALHNHYTQKSLSLSLG |
| SEQ ID NO: 3109 | DNA | CAAGTGCAGCTGGTGCAGTCGGGAGCCGAAGTGAAGAAGCC |
| | heavy | TGGAGCCTCGGTGAAGGTGTCGTGCAAGGCATCCGGATTCA |
| | chain | CCCTCACCAATTACGGGATGAACTGGGTCAGACAGGCCCGG |
| | | GGTCAACGGCTGGAGTGGATCGGATGGATTAACACCGACAC |
| | | CGGGGAGCCTACCTACGCGGACGATTTCAAGGGACGGTTCG |
| | | TGTTCTCCCTCGACACCTCCGTGTCCACCGCCTACCTCCAAA |
| | | TCTCCTCACTGAAAGCGGAGGACACCGCCGTGTACTATTGC |
| | | GCGAGGAACCCGCCCTACTACTACGGAACCAACAACGCCGA |
| | | AGCCATGGACTACTGGGGCCAGGGCACCACTGTGACTGTGT |
| | | CCAGCGCGTCCACTAAGGGCCCGTCCGTGTTCCCCCTGGCAC |
| | | CTTGTAGCCGGAGCACTAGCGAATCCACCGCTGCCCTCGGCT |
| | | GCCTGGTCAAGGATTACTTCCCGGAGCCCGTGACCGTGTCCT |
| | | GGAACAGCGGAGCCCTGACCTCCGGAGTGCACACCTTCCCC |
| | | GCTGTGCTGCAGAGCTCCGGGCTGTACTCGCTGTCGTCGGTG |
| | | GTCACGGTGCCTTCATCTAGCCTGGGTACCAAGACCTACACT |
| | | TGCAACGTGGACCACAAGCCTTCCAACACTAAGGTGGACAA |
| | | GCGCGTCGAATCGAAGTACGGCCCACCGTGCCCGCCTTGTC |
| | | CCGCGCCGGAGTTCCTCGGCGGTCCCTCGGTCTTTCTGTTCC |
| | | CACCGAAGCCCAAGGACACTTTGATGATTTCCCGCACCCCTG |
| | | AAGTGACATGCGTGGTCGTGGACGTGTCACAGGAAGATCCG |
| | | GAGGTGCAGTTCAATTGGTACGTGGATGGCGTCGAGGTGCA |
| | | CAACGCCAAAACCAAGCCGAGGGAGGAGCAGTTCAACTCCA |
| | | CTTACCGCGTCGTGTCCGTGCTGACGGTGCTGCATCAGGACT |
| | | GGCTGAACGGGAAGGAGTACAAGTGCAAAGTGTCCAACAA |
| | | GGGACTTCCTAGCTCAATCGAAAAGACCATCTCGAAAGCCA |
| | | AGGGACAGCCCCGGGAACCCCAAGTGTATACCCTGCCACCG |
| | | AGCCAGGAAGAAATGACTAAGAACCAAGTCTCATTGACTTG |
| | | CCTTGTGAAGGGCTTCTACCCATCGGATATCGCCGTGGAATG |
| | | GGAGTCCAACGGCCAGCCGGAAAACAACTACAAGACCACCC |
| | | CTCCGGTGCTGGACTCAGACGGATCCTTCTTCCTCTACTCGC |
| | | GGCTGACCGTGGATAAGAGCAGATGGCAGGAGGGAAATGT |
| | | GTTCAGCTGTTCTGTGATGCATGAAGCCCTGCACAACCACTA |
| | | CACTCAGAAGTCCCTGTCCCTCTCCCTGGGA |
| SEQ ID NO: 3110 | DNA heavy | CAGGTGCAGCTGGTGCAGTCTGGCGCCGAAGTGAAGAAACC |
| | chain | TGGCGCCTCCGTGAAGGTGTCCTGCAAGGCCTCTGGCTTCAC |
| | | CCTGACCAACTACGGCATGAACTGGGTGCGACAGGCCAGGG |
| | | GCCAGCGGCTGGAATGGATCGGCTGGATCAACACCGACACC |
| | | GGCGAGCCTACCTACGCCGACGACTTCAAGGGCAGATTCGT |
| | | GTTCTCCCTGGACACCTCCGTGTCCACCGCCTACCTGCAGAT |
| | | CTCCAGCCTGAAGGCCGAGGATACCGCCGTGTACTACTGCG |
| | | CCCGGAACCCCCCTTACTACTACGGCACCAACAACGCCGAG |
| | | GCCATGGACTATTGGGGCCAGGGCACCACCGTGACCGTGTC |
| | | CTCTGCTTCTACCAAGGGGCCCAGCGTGTTCCCCCTGGCCCC |
| | | CTGCTCCAGAAGCACCAGCGAGAGCACAGCCGCCCTGGGCT |
| | | GCCTGGTGAAGGACTACTTCCCCGAGCCCGTGACCGTGTCCT |
| | | GGAACAGCGGAGCCCTGACCAGCGGCGTGCACACCTTCCCC |
| | | GCCGTGCTGCAGAGCAGCGGCCTGTACAGCCTGAGCAGCGT |
| | | GGTGACCGTGCCCAGCAGCAGCCTGGGCACCAAGACCTACA |
| | | CCTGTAACGTGGACCACAAGCCCAGCAACACCAAGGTGGAC |
| | | AAGAGGGTGGAGAGCAAGTACGGCCCACCCTGCCCCCCCTG |
| | | CCCAGCCCCCGAGTTCCTGGGCGGACCCAGCGTGTTCCTGTT |
| | | CCCCCCCAAGCCCAAGGACACCCTGATGATCAGCAGAACCC |
| | | CCGAGGTGACCTGTGTGGTGGTGGACGTGTCCCAGGAGGAC |
| | | CCCGAGGTCCAGTTCAACTGGTACGTGGACGGCGTGGAGGT |
| | | GCACAACGCCAAGACCAAGCCCAGAGAGGAGCAGTTTAAC |
| | | AGCACCTACCGGGTGGTGTCCGTGCTGACCGTGCTGCACCA |
| | | GGACTGGCTGAACGGCAAAGAGTACAAGTGTAAGGTCTCCA |
| | | ACAAGGGCCTGCCAAGCAGCATCGAAAAGACCATCAGCAA |
| | | GGCCAAGGGCCAGCCTAGAGAGCCCCAGGTCTACACCCTGC |
| | | CACCCAGCCAAGAGGAGATGACCAAGAACCAGGTGTCCCTG |
| | | ACCTGTCTGGTGAAGGGCTTCTACCCAAGCGACATCGCCGT |
| | | GGAGTGGGAGAGCAACGGCCAGCCCGAGAACAACTACAAG |
| | | ACCACCCCCCCAGTGCTGGACAGCGACGGCAGCTTCTTCCTG |
| | | TACAGCAGGCTGACCGTGGACAAGTCCAGATGGCAGGAGGG |
| | | CAACGTCTTTAGCTGCTCCGTGATGCACGAGGCCCTGCACAA |
| | | CCACTACACCCAGAAGAGCCTGAGCCTGTCCCTGGGC |
| BAP050-Clone I LC | | |
| SEQ ID NO: 3103 | LCDR1 | SSSQDISNYLN |
| (Kabat) | | |
| SEQ ID NO: 3104 | LCDR2 | YTSTLHL |
| (Kabat) | | |
| SEQ ID NO: | LCDR3 | QQYYNLPWT |
| 3105(Kabat) | | |
| SEQ ID NO: 3106 | LCDR1 | SQDISNY |
| (Chothia) | | |
| SEQ ID NO: | LCDR2 | YTS |
| 3107(Chothia) | | |
| SEQ ID NO: 3108 | LCDR3 | YYNLPW |
| (Chothia) | | |
| SEQ ID NO: 3111 | VL | DIQMTQSPSSLSASVGDRVTITCSSSQDISNYLNWYLQKPGQSP |
| | | QLLIYYTSTLHLGVPSRFSGSGSGTEFTLTISSLQPDDFATYYCQ |
| | | QYYNLPWTFGQGTKVEIK |
| SEQ ID NO: 3112 | DNA | GATATTCAGATGACTCAGTCACCTAGTAGCCTGAGCGCTAGT |
| | VL | GTGGGCGATAGAGTGACTATCACCTGTAGCTCTAGTCAGGA |
| | | TATCTCTAACTACCTGAACTGGTATCTGCAGAAGCCCGGTCA |
| | | ATCACCTCAGCTGCTGATCTACTACACTAGCACCCTGCACCT |
| | | GGGCGTGCCCTCTAGGTTTAGCGGTAGCGGTAGTGGCACCG |
| | | AGTTCACCCTGACTATCTCTAGCCTGCAGCCCGACGACTTCG |
| | | CTACCTACTACTGTCAGCAGTACTATAACCTGCCCTGGACCT |
| | | TCGGTCAAGGCACTAAGGTCGAGATTAAG |
| SEQ ID NO: 3113 | DNA | GACATCCAGATGACCCAGTCCCCCTCCAGCCTGTCTGCTTCC |
| | VL | GTGGGCGACAGAGTGACCATCACCTGTTCCTCCAGCCAGGA |
| | | CATCTCCAACTACCTGAACTGGTATCTGCAGAAGCCCGGCC |
| | | AGTCCCCTCAGCTGCTGATCTACTACACCTCCACCCTGCACC |
| | | TGGGCGTGCCCTCCAGATTTTCCGGCTCTGGCTCTGGCACCG |
| | | AGTTTACCCTGACCATCAGCTCCCTGCAGCCCGACGACTTCG |
| | | CCACCTACTACTGCCAGCAGTACTACAACCTGCCCTGGACCT |
| | | TCGGCCAGGGCACCAAGGTGGAAATCAAG |
| SEQ ID NO: 3114 | Light | DIQMTQSPSSLSASVGDRVTITCSSSQDISNYLNWYLQKPGQSP |
| | chain | QLLIYYTSTLHLGVPSRFSGSGSGTEFTLTISSLQPDDFATYYCQ |
| | | QYYNLPWTFGQGTKVEIKRTVAAPSVFIFPPSDEQLKSGTASVV |
| | | CLLNNFYPREAKVQWKVDNALQSGNSQESVTEQDSKDSTYSL |
| | | SSTLTLSKADYEKHKVYACEVTHQGLSSPVTKSFNRGEC |
| SEQ ID NO: 3115 | DNA | GATATTCAGATGACTCAGTCACCTAGTAGCCTGAGCGCTAGT |
| | light | GTGGGCGATAGAGTGACTATCACCTGTAGCTCTAGTCAGGA |
| | chain | TATCTCTAACTACCTGAACTGGTATCTGCAGAAGCCCGGTCA |
| | | ATCACCTCAGCTGCTGATCTACTACACTAGCACCCTGCACCT |
| | | GGGCGTGCCCTCTAGGTTTAGCGGTAGCGGTAGTGGCACCG |
| | | AGTTCACCCTGACTATCTCTAGCCTGCAGCCCGACGACTTCG |
| | | CTACCTACTACTGTCAGCAGTACTATAACCTGCCCTGGACCT |
| | | TCGGTCAAGGCACTAAGGTCGAGATTAAGCGTACGGTGGCC |
| | | GCTCCCAGCGTGTTCATCTTCCCCCCCAGCGACGAGCAGCTG |
| | | AAGAGCGGCACCGCCAGCGTGGTGTGCCTGCTGAACAACTT |
| | | CTACCCCCGGGAGGCCAAGGTGCAGTGGAAGGTGGACAACG |
| | | CCCTGCAGAGCGGCAACAGCCAGGAGAGCGTCACCGAGCA |
| | | GGACAGCAAGGACTCCACCTACAGCCTGAGCAGCACCCTGA |
| | | CCCTGAGCAAGGCCGACTACGAGAAGCATAAGGTGTACGCC |
| | | TGCGAGGTGACCCACCAGGGCCTGTCCAGCCCCGTGACCAA |
| | | GAGCTTCAACAGGGGCGAGTGC |
| SEQ ID NO: 3116 | DNA | GACATCCAGATGACCCAGTCCCCCTCCAGCCTGTCTGCTTCC |
| | light | GTGGGCGACAGAGTGACCATCACCTGTTCCTCCAGCCAGGA |
| | chain | CATCTCCAACTACCTGAACTGGTATCTGCAGAAGCCCGGCC |
| | | AGTCCCCTCAGCTGCTGATCTACTACACCTCCACCCTGCACC |
| | | TGGGCGTGCCCTCCAGATTTTCCGGCTCTGGCTCTGGCACCG |
| | | AGTTTACCCTGACCATCAGCTCCCTGCAGCCCGACGACTTCG |
| | | CCACCTACTACTGCCAGCAGTACTACAACCTGCCCTGGACCT |
| | | TCGGCCAGGGCACCAAGGTGGAAATCAAGCGTACGGTGGCC |
| | | GCTCCCAGCGTGTTCATCTTCCCCCCAAGCGACGAGCAGCTG |
| | | AAGAGCGGCACCGCCAGCGTGGTGTGTCTGCTGAACAACTT |
| | | CTACCCCAGGGAGGCCAAGGTGCAGTGGAAGGTGGACAAC |
| | | GCCCTGCAGAGCGGCAACAGCCAGGAGAGCGTCACCGAGC |
| | | AGGACAGCAAGGACTCCACCTACAGCCTGAGCAGCACCCTG |
| | | ACCCTGAGCAAGGCCGACTACGAGAAGCACAAGGTGTACGC |
| | | CTGTGAGGTGACCCACCAGGGCCTGTCCAGCCCCGTGACCA |
| | | AGAGCTTCAACAGGGGCGAGTGC |
| BAP050-Clone J | | |
| HC | | |
| SEQ ID NO: 3094 | HCDR1 | NYGMN |
| (Kabat) | | |
| SEQ ID NO: 3095 | HCDR2 | WINTDTGEPTYADDFKG |
| (Kabat) | | |
| SEQ ID NO: 3096 | HCDR3 | NPPYYYGTNNAEAMDY |
| (Kabat) | | |
| SEQ ID NO: 3097 | HCDR1 | GFTLTNY |
| (Chothia) | | |
| SEQ ID NO: | HCDR2 | NTDTGE |
| 3098(Chothia) | | |
| SEQ ID NO: | HCDR3 | NPPYYYGTNNAEAMDY |
| 3096(Chothia) | | |
| SEQ ID NO: 3117 | VH | QVQLVQSGAEVKKPGASVKVSCKASGFTLTNYGMNWVRQAP |
| | | GQGLEWMGWINTDTGEPTYADDFKGRFVFSLDTSVSTAYLQIS |
| | | SLKAEDTAVYYCARNPPYYYGTNNAEAMDYWGQGTTVTVSS |
| SEQ ID NO: 3118 | DNA | CAGGTGCAGCTGGTGCAGTCAGGCGCCGAAGTGAAGAAACC |
| | VH | CGGCGCTAGTGTGAAAGTCAGCTGTAAAGCTAGTGGCTTCA |
| | | CCCTGACTAACTACGGGATGAACTGGGTCCGCCAGGCCCCA |
| | | GGTCAAGGCCTCGAGTGGATGGGCTGGATTAACACCGACAC |
| | | CGGCGAGCCTACCTACGCCGACGACTTTAAGGGCAGATTCG |
| | | TGTTTAGCCTGGACACTAGTGTGTCTACCGCCTACCTGCAGA |
| | | TCTCTAGCCTGAAGGCCGAGGACACCGCCGTCTACTACTGC |
| | | GCTAGAAACCCCCCCTACTACTACGGCACTAACAACGCCGA |
| | | GGCTATGGACTACTGGGGTCAAGGCACTACCGTGACCGTGT |
| | | CTAGC |
| SEQ ID NO: 3119 | DNA | CAGGTGCAGCTGGTGCAGTCTGGCGCCGAAGTGAAGAAACC |
| | VH | TGGCGCCTCCGTGAAGGTGTCCTGCAAGGCCTCTGGCTTCAC |
| | | CCTGACCAACTACGGCATGAACTGGGTGCGACAGGCCCCTG |
| | | GACAGGGCCTGGAATGGATGGGCTGGATCAACACCGACACC |
| | | GGCGAGCCTACCTACGCCGACGACTTCAAGGGCAGATTCGT |
| | | GTTCTCCCTGGACACCTCCGTGTCCACCGCCTACCTGCAGAT |
| | | CTCCAGCCTGAAGGCCGAGGATACCGCCGTGTACTACTGCG |
| | | CCCGGAACCCCCCTTACTACTACGGCACCAACAACGCCGAG |
| | | GCCATGGACTATTGGGGCCAGGGCACCACCGTGACCGTGTC |
| | | CTCT |
| SEQ ID NO: 3120 | Heavy | QVQLVQSGAEVKKPGASVKVSCKASGFTLTNYGMNWVRQAP |
| | chain | GQGLEWMGWINTDTGEPTYADDFKGRFVFSLDTSVSTAYLQIS |
| | | SLKAEDTAVYYCARNPPYYYGTNNAEAMDYWGQGTTVTVSS |
| | | ASTKGPSVFPLAPCSRSTSESTAALGCLVKDYFPEPVTVSWNSG |
| | | ALTSGVHTFPAVLQSSGLYSLSSVVTVPSSSLGTKTYTCNVDHK |
| | | PSNTKVDKRVESKYGPPCPPCPAPEFLGGPSVFLFPPKPKDTLMI |
| | | SRTPEVTCVVVDVSQEDPEVQFNWYVDGVEVHNAKTKPREEQ |
| | | FNSTYRVVSVLTVLHQDWLNGKEYKCKVSNKGLPSSIEKTISK |
| | | AKGQPREPQVYTLPPSQEEMTKNQVSLTCLVKGFYPSDIAVEW |
| | | ESNGQPENNYKTTPPVLDSDGSFFLYSRLTVDKSRWQEGNVFS |
| | | CSVMHEALHNHYTQKSLSLSLG |
| SEQ ID NO: 3121 | DNA | CAGGTGCAGCTGGTGCAGTCAGGCGCCGAAGTGAAGAAACC |
| | heavy | CGGCGCTAGTGTGAAAGTCAGCTGTAAAGCTAGTGGCTTCA |
| | chain | CCCTGACTAACTACGGGATGAACTGGGTCCGCCAGGCCCCA |
| | | GGTCAAGGCCTCGAGTGGATGGGCTGGATTAACACCGACAC |
| | | CGGCGAGCCTACCTACGCCGACGACTTTAAGGGCAGATTCG |
| | | TGTTTAGCCTGGACACTAGTGTGTCTACCGCCTACCTGCAGA |
| | | TCTCTAGCCTGAAGGCCGAGGACACCGCCGTCTACTACTGC |
| | | GCTAGAAACCCCCCCTACTACTACGGCACTAACAACGCCGA |
| | | GGCTATGGACTACTGGGGTCAAGGCACTACCGTGACCGTGT |
| | | CTAGCGCTAGCACTAAGGGCCCGTCCGTGTTCCCCCTGGCAC |
| | | CTTGTAGCCGGAGCACTAGCGAATCCACCGCTGCCCTCGGCT |
| | | GCCTGGTCAAGGATTACTTCCCGGAGCCCGTGACCGTGTCCT |
| | | GGAACAGCGGAGCCCTGACCTCCGGAGTGCACACCTTCCCC |
| | | GCTGTGCTGCAGAGCTCCGGGCTGTACTCGCTGTCGTCGGTG |
| | | GTCACGGTGCCTTCATCTAGCCTGGGTACCAAGACCTACACT |
| | | TGCAACGTGGACCACAAGCCTTCCAACACTAAGGTGGACAA |
| | | GCGCGTCGAATCGAAGTACGGCCCACCGTGCCCGCCTTGTC |
| | | CCGCGCCGGAGTTCCTCGGCGGTCCCTCGGTCTTTCTGTTCC |
| | | CACCGAAGCCCAAGGACACTTTGATGATTTCCCGCACCCCTG |
| | | AAGTGACATGCGTGGTCGTGGACGTGTCACAGGAAGATCCG |
| | | GAGGTGCAGTTCAATTGGTACGTGGATGGCGTCGAGGTGCA |
| | | CAACGCCAAAACCAAGCCGAGGGAGGAGCAGTTCAACTCCA |
| | | CTTACCGCGTCGTGTCCGTGCTGACGGTGCTGCATCAGGACT |
| | | GGCTGAACGGGAAGGAGTACAAGTGCAAAGTGTCCAACAA |
| | | GGGACTTCCTAGCTCAATCGAAAAGACCATCTCGAAAGCCA |
| | | AGGGACAGCCCCGGGAACCCCAAGTGTATACCCTGCCACCG |
| | | AGCCAGGAAGAAATGACTAAGAACCAAGTCTCATTGACTTG |
| | | CCTTGTGAAGGGCTTCTACCCATCGGATATCGCCGTGGAATG |
| | | GGAGTCCAACGGCCAGCCGGAAAACAACTACAAGACCACCC |
| | | CTCCGGTGCTGGACTCAGACGGATCCTTCTTCCTCTACTCGC |
| | | GGCTGACCGTGGATAAGAGCAGATGGCAGGAGGGAAATGT |
| | | GTTCAGCTGTTCTGTGATGCATGAAGCCCTGCACAACCACTA |
| | | CACTCAGAAGTCCCTGTCCCTCTCCCTGGGA |
| SEQ ID NO: 3122 | DNA | CAGGTGCAGCTGGTGCAGTCTGGCGCCGAAGTGAAGAAACC |
| | heavy | TGGCGCCTCCGTGAAGGTGTCCTGCAAGGCCTCTGGCTTCAC |
| | chain | CCTGACCAACTACGGCATGAACTGGGTGCGACAGGCCCCTG |
| | | GACAGGGCCTGGAATGGATGGGCTGGATCAACACCGACACC |
| | | GGCGAGCCTACCTACGCCGACGACTTCAAGGGCAGATTCGT |
| | | GTTCTCCCTGGACACCTCCGTGTCCACCGCCTACCTGCAGAT |
| | | CTCCAGCCTGAAGGCCGAGGATACCGCCGTGTACTACTGCG |
| | | CCCGGAACCCCCCTTACTACTACGGCACCAACAACGCCGAG |
| | | GCCATGGACTATTGGGGCCAGGGCACCACCGTGACCGTGTC |
| | | CTCTGCTTCTACCAAGGGGCCCAGCGTGTTCCCCCTGGCCCC |
| | | CTGCTCCAGAAGCACCAGCGAGAGCACAGCCGCCCTGGGCT |
| | | GCCTGGTGAAGGACTACTTCCCCGAGCCCGTGACCGTGTCCT |
| | | GGAACAGCGGAGCCCTGACCAGCGGCGTGCACACCTTCCCC |
| | | GCCGTGCTGCAGAGCAGCGGCCTGTACAGCCTGAGCAGCGT |
| | | GGTGACCGTGCCCAGCAGCAGCCTGGGCACCAAGACCTACA |
| | | CCTGTAACGTGGACCACAAGCCCAGCAACACCAAGGTGGAC |
| | | AAGAGGGTGGAGAGCAAGTACGGCCCACCCTGCCCCCCCTG |
| | | CCCAGCCCCCGAGTTCCTGGGCGGACCCAGCGTGTTCCTGTT |
| | | CCCCCCCAAGCCCAAGGACACCCTGATGATCAGCAGAACCC |
| | | CCGAGGTGACCTGTGTGGTGGTGGACGTGTCCCAGGAGGAC |
| | | CCCGAGGTCCAGTTCAACTGGTACGTGGACGGCGTGGAGGT |
| | | GCACAACGCCAAGACCAAGCCCAGAGAGGAGCAGTTTAAC |
| | | AGCACCTACCGGGTGGTGTCCGTGCTGACCGTGCTGCACCA |
| | | GGACTGGCTGAACGGCAAAGAGTACAAGTGTAAGGTCTCCA |
| | | ACAAGGGCCTGCCAAGCAGCATCGAAAAGACCATCAGCAA |
| | | GGCCAAGGGCCAGCCTAGAGAGCCCCAGGTCTACACCCTGC |
| | | CACCCAGCCAAGAGGAGATGACCAAGAACCAGGTGTCCCTG |
| | | ACCTGTCTGGTGAAGGGCTTCTACCCAAGCGACATCGCCGT |
| | | GGAGTGGGAGAGCAACGGCCAGCCCGAGAACAACTACAAG |
| | | ACCACCCCCCCAGTGCTGGACAGCGACGGCAGCTTCTTCCTG |
| | | TACAGCAGGCTGACCGTGGACAAGTCCAGATGGCAGGAGGG |
| | | CAACGTCTTTAGCTGCTCCGTGATGCACGAGGCCCTGCACAA |
| | | CCACTACACCCAGAAGAGCCTGAGCCTGTCCCTGGGC |
| BAP050-Clone J LC | | |
| SEQ ID NO: | LCDR1 | SSSQDISNYLN |
| 3103(Kabat) | | |
| SEQ ID NO: 3104 | LCDR2 | YTSTLHL |
| (Kabat) | | |
| SEQ ID NO: 3105 | LCDR3 | QQYYNLPWT |
| (Kabat) | | |
| SEQ ID NO: 3106 | LCDR1 | SQDISNY |
| (Chothia) | | |
| SEQ ID NO: 3107 | LCDR2 | YTS |
| (Chothia) | | |
| SEQ ID NO: 3108 | LCDR3 | YYNLPW |
| (Chothia) | | |
| SEQ ID NO: 3123 | VL | DIQMTQSPSSLSASVGDRVTITCSSSQDISNYLNWYQQKPGKAP |
| | | KLLIYYTSTLHLGIPPRFSGSGYGTDFTLTINNIESEDAAYYFCQ |
| | | QYYNLPWTFGQGTKVEIK |
| SEQ ID NO: 3124 | DNA | GATATTCAGATGACTCAGTCACCTAGTAGCCTGAGCGCTAGT |
| | VL | GTGGGCGATAGAGTGACTATCACCTGTAGCTCTAGTCAGGA |
| | | TATCTCTAACTACCTGAACTGGTATCAGCAGAAGCCCGGTA |
| | | AAGCCCCTAAGCTGCTGATCTACTACACTAGCACCCTGCACC |
| | | TGGGAATCCCCCCTAGGTTTAGCGGTAGCGGCTACGGCACC |
| | | GACTTCACCCTGACTATTAACAATATCGAGTCAGAGGACGC |
| | | CGCCTACTACTTCTGTCAGCAGTACTATAACCTGCCCTGGAC |
| | | CTTCGGTCAAGGCACTAAGGTCGAGATTAAG |
| SEQ ID NO: 3125 | DNA | GACATCCAGATGACCCAGTCCCCCTCCAGCCTGTCTGCTTCC |
| | VL | GTGGGCGACAGAGTGACCATCACCTGTTCCTCCAGCCAGGA |
| | | CATCTCCAACTACCTGAACTGGTATCAGCAGAAGCCCGGCA |
| | | AGGCCCCCAAGCTGCTGATCTACTACACCTCCACCCTGCACC |
| | | TGGGCATCCCCCCTAGATTCTCCGGCTCTGGCTACGGCACCG |
| | | ACTTCACCCTGACCATCAACAACATCGAGTCCGAGGACGCC |
| | | GCCTACTACTTCTGCCAGCAGTACTACAACCTGCCCTGGACC |
| | | TTCGGCCAGGGCACCAAGGTGGAAATCAAG |
| SEQ ID NO: 3126 | Light | DIQMTQSPSSLSASVGDRVTITCSSSQDISNYLNWYQQKPGKAP |
| | chain | KLLIYYTSTLHLGIPPRFSGSGYGTDFTLTINNIESEDAAYYFCQ |
| | | QYYNLPWTFGQGTKVEIKRTVAAPSVFIFPPSDEQLKSGTASVV |
| | | CLLNNFYPREAKVQWKVDNALQSGNSQESVTEQDSKDSTYSL |
| | | SSTLTLSKADYEKHKVYACEVTHQGLSSPVTKSFNRGEC |
| SEQ ID NO: 3127 | DNA | GATATTCAGATGACTCAGTCACCTAGTAGCCTGAGCGCTAGT |
| | light | GTGGGCGATAGAGTGACTATCACCTGTAGCTCTAGTCAGGA |
| | chain | TATCTCTAACTACCTGAACTGGTATCAGCAGAAGCCCGGTA |
| | | AAGCCCCTAAGCTGCTGATCTACTACACTAGCACCCTGCACC |
| | | TGGGAATCCCCCCTAGGTTTAGCGGTAGCGGCTACGGCACC |
| | | GACTTCACCCTGACTATTAACAATATCGAGTCAGAGGACGC |
| | | CGCCTACTACTTCTGTCAGCAGTACTATAACCTGCCCTGGAC |
| | | CTTCGGTCAAGGCACTAAGGTCGAGATTAAGCGTACGGTGG |
| | | CCGCTCCCAGCGTGTTCATCTTCCCCCCCAGCGACGAGCAGC |
| | | TGAAGAGCGGCACCGCCAGCGTGGTGTGCCTGCTGAACAAC |
| | | TTCTACCCCCGGGAGGCCAAGGTGCAGTGGAAGGTGGACAA |
| | | CGCCCTGCAGAGCGGCAACAGCCAGGAGAGCGTCACCGAGC |
| | | AGGACAGCAAGGACTCCACCTACAGCCTGAGCAGCACCCTG |
| | | ACCCTGAGCAAGGCCGACTACGAGAAGCATAAGGTGTACGC |
| | | CTGCGAGGTGACCCACCAGGGCCTGTCCAGCCCCGTGACCA |
| | | AGAGCTTCAACAGGGGCGAGTGC |
| SEQ ID NO: 3128 | DNA | GACATCCAGATGACCCAGTCCCCCTCCAGCCTGTCTGCTTCC |
| | light | GTGGGCGACAGAGTGACCATCACCTGTTCCTCCAGCCAGGA |
| | chain | CATCTCCAACTACCTGAACTGGTATCAGCAGAAGCCCGGCA |
| | | AGGCCCCCAAGCTGCTGATCTACTACACCTCCACCCTGCACC |
| | | TGGGCATCCCCCCTAGATTCTCCGGCTCTGGCTACGGCACCG |
| | | ACTTCACCCTGACCATCAACAACATCGAGTCCGAGGACGCC |
| | | GCCTACTACTTCTGCCAGCAGTACTACAACCTGCCCTGGACC |
| | | TTCGGCCAGGGCACCAAGGTGGAAATCAAGCGTACGGTGGC |
| | | CGCTCCCAGCGTGTTCATCTTCCCCCCAAGCGACGAGCAGCT |
| | | GAAGAGCGGCACCGCCAGCGTGGTGTGTCTGCTGAACAACT |
| | | TCTACCCCAGGGAGGCCAAGGTGCAGTGGAAGGTGGACAAC |
| | | GCCCTGCAGAGCGGCAACAGCCAGGAGAGCGTCACCGAGC |
| | | AGGACAGCAAGGACTCCACCTACAGCCTGAGCAGCACCCTG |
| | | ACCCTGAGCAAGGCCGACTACGAGAAGCACAAGGTGTACGC |
| | | CTGTGAGGTGACCCACCAGGGCCTGTCCAGCCCCGTGACCA |
| | | AGAGCTTCAACAGGGGCGAGTGC |
| BAP050-Clone I HC | | |
| SEQ ID NO: 3129 | HCDR1 | AATTACGGGATGAAC |
| (Kabat) | | |
| SEQ ID NO: | HCDR1 | AACTACGGCATGAAC |
| 3130(Kabat) | | |
| SEQ ID NO: 3131 | HCDR2 | TGGATTAACACCGACACCGGGGAGCCTACCTACGCGGACGA |
| (Kabat) | | TTTCAAGGGA |
| SEQ ID NO: | HCDR2 | TGGATCAACACCGACACCGGCGAGCCTACCTACGCCGACGA |
| 3132(Kabat) | | CTTCAAGGGC |
| SEQ ID NO: 3133 | HCDR3 | AACCCGCCCTACTACTACGGAACCAACAACGCCGAAGCCAT |
| (Kabat) | | GGACTAC |
| SEQ ID NO: 3134 | HCDR3 | AACCCCCCTTACTACTACGGCACCAACAACGCCGAGGCCAT |
| (Kabat) | | GGACTAT |
| SEQ ID NO: | HCDR1 | GGATTCACCCTCACCAATTAC |
| 3135(Chothia) | | |
| SEQ ID NO: 3136 | HCDR1 | GGCTTCACCCTGACCAACTAC |
| (Chothia) | | |
| SEQ ID NO: 3137 | HCDR2 | AACACCGACACCGGGGAG |
| (Chothia) | | |
| SEQ ID NO: 3138 | HCDR2 | AACACCGACACCGGCGAG |
| (Chothia) | | |
| SEQ ID NO: 3133 | HCDR3 | AACCCGCCCTACTACTACGGAACCAACAACGCCGAAGCCAT |
| (Chothia) | | GGACTAC |
| SEQ ID NO: | HCDR3 | AACCCCCCTTACTACTACGGCACCAACAACGCCGAGGCCAT |
| 3134(Chothia) | | GGACTAT |
| BAP050-Clone I LC | | |
| SEQ ID NO: | LCDR1 | AGCTCTAGTCAGGATATCTCTAACTACCTGAAC |
| 3139(Kabat) | | |
| SEQ ID NO: 3140 | LCDR1 | TCCTCCAGCCAGGACATCTCCAACTACCTGAAC |
| (Kabat) | | |
| SEQ ID NO: | LCDR2 | TACACTAGCACCCTGCACCTG |
| 3141(Kabat) | | |
| SEQ ID NO: 3142 | LCDR2 | TACACCTCCACCCTGCACCTG |
| (Kabat) | | |
| SEQ ID NO: | LCDR3 | CAGCAGTACTATAACCTGCCCTGGACC |
| 3143(Kabat) | | |
| SEQ ID NO: 3144 | LCDR3 | CAGCAGTACTACAACCTGCCCTGGACC |
| (Kabat) | | |
| SEQ ID NO: 3145 | LCDR1 | AGTCAGGATATCTCTAACTAC |
| (Chothia) | | |
| SEQ ID NO: 3146 | LCDR1 | AGCCAGGACATCTCCAACTAC |
| (Chothia) | | |
| SEQ ID NO: 3147 | LCDR2 | TACACTAGC |
| (Chothia) | | |
| SEQ ID NO: | LCDR2 | TACACCTCC |
| 3148(Chothia) | | |
| SEQ ID NO: 3149 | LCDR3 | TACTATAACCTGCCCTGG |
| (Chothia) | | |
| SEQ ID NO: 164 | LCDR3 | TACTACAACCTGCCCTGG |
| (Chothia) | | |
| BAP050-Clone J | | |
| HC | | |
| SEQ ID NO: | HCDR1 | AACTACGGGATGAAC |
| 3150(Kabat) | | |
| SEQ ID NO: 3130 | HCDR1 | AACTACGGCATGAAC |
| (Kabat) | | |
| SEQ ID NO: 3151 | HCDR2 | TGGATTAACACCGACACCGGCGAGCCTACCTACGCCGACGA |
| (Kabat) | | CTTTAAGGGC |
| SEQ ID NO: 3132 | HCDR2 | TGGATCAACACCGACACCGGCGAGCCTACCTACGCCGACGA |
| (Kabat) | | CTTCAAGGGC |
| SEQ ID NO: 3152 | HCDR3 | AACCCCCCCTACTACTACGGCACTAACAACGCCGAGGCTAT |
| (Kabat) | | GGACTAC |
| SEQ ID NO: 3134 | HCDR3 | AACCCCCCTTACTACTACGGCACCAACAACGCCGAGGCCAT |
| (Kabat) | | GGACTAT |
| SEQ ID NO: 3153 | HCDR1 | GGCTTCACCCTGACTAACTAC |
| (Chothia) | | |
| SEQ ID NO: 3136 | HCDR1 | GGCTTCACCCTGACCAACTAC |
| (Chothia) | | |
| SEQ ID NO: 3137 | HCDR2 | AACACCGACACCGGGGAG |
| (Chothia) | | |
| SEQ ID NO: 3138 | HCDR2 | AACACCGACACCGGCGAG |
| (Chothia) | | |
| SEQ ID NO: 3152 | HCDR3 | AACCCCCCCTACTACTACGGCACTAACAACGCCGAGGCTAT |
| (Chothia) | | GGACTAC |
| SEQ ID NO: 3134 | HCDR3 | AACCCCCCTTACTACTACGGCACCAACAACGCCGAGGCCAT |
| (Chothia) | | GGACTAT |
| BAP050-Clone J LC | | |
| SEQ ID NO: 3139 | LCDR1 | AGCTCTAGTCAGGATATCTCTAACTACCTGAAC |
| (Kabat) | | |
| SEQ ID NO: 3140 | LCDR1 | TCCTCCAGCCAGGACATCTCCAACTACCTGAAC |
| (Kabat) | | |
| SEQ ID NO: 3141 | LCDR2 | TACACTAGCACCCTGCACCTG |
| (Kabat) | | |
| SEQ ID NO: | LCDR2 | TACACCTCCACCCTGCACCTG |
| 3142(Kabat) | | |
| SEQ ID NO: 3143 | LCDR3 | CAGCAGTACTATAACCTGCCCTGGACC |
| (Kabat) | | |
| SEQ ID NO: 3144 | LCDR3 | CAGCAGTACTACAACCTGCCCTGGACC |
| (Kabat) | | |
| SEQ ID NO: 3145 | LCDR1 | AGTCAGGATATCTCTAACTAC |
| (Chothia) | | |
| SEQ ID NO: 3146 | LCDR1 | AGCCAGGACATCTCCAACTAC |
| (Chothia) | | |
| SEQ ID NO: 3147 | LCDR2 | TACACTAGC |
| (Chothia) | | |
| SEQ ID NO: 3148 | LCDR2 | TACACCTCC |
| (Chothia) | | |
| SEQ ID NO: 3149 | LCDR3 | TACTATAACCTGCCCTGG |
| (Chothia) | | |
| SEQ ID NO: 164 | LCDR3 | TACTACAACCTGCCCTGG |
| (Chothia) | | |

[0915] Other Exemplary LAG-3 Inhibitors

[0916] In one embodiment, the LAG-3 inhibitor is an anti-LAG-3 antibody molecule. In one embodiment, the LAG-3 inhibitor is BMS-986016 (Bristol-Myers Squibb), also known as BMS986016. BMS-986016 and other anti-LAG-3 antibodies are disclosed in WO 2015/116539 and U.S. Pat. No. 9,505,839, incorporated by reference in their entirety. In one embodiment, the anti-LAG-3 antibody molecule comprises one or more of the CDR sequences (or collectively all of the CDR sequences), the heavy chain or light chain variable region sequence, or the heavy chain or light chain sequence of BMS-986016, e.g., as disclosed in Table 19.

[0917] In one embodiment, the anti-LAG-3 antibody molecule is TSR-033 (Tesaro). In one embodiment, the anti-LAG-3 antibody molecule comprises one or more of the CDR sequences (or collectively all of the CDR sequences), the heavy chain or light chain variable region sequence, or the heavy chain or light chain sequence of TSR-033.

[0918] In one embodiment, the anti-LAG-3 antibody molecule is IMP731 or GSK2831781 (GSK and Prima BioMed). IMP731 and other anti-LAG-3 antibodies are disclosed in WO 2008/132601 and U.S. Pat. No. 9,244,059, incorporated by reference in their entirety. In one embodiment, the anti-LAG-3 antibody molecule comprises one or more of the CDR sequences (or collectively all of the CDR sequences), the heavy chain or light chain variable region sequence, or the heavy chain or light chain sequence of IMP731, e.g., as disclosed in Table 19. In one embodiment, the anti-LAG-3 antibody molecule comprises one or more of the CDR sequences (or collectively all of the CDR sequences), the heavy chain or light chain variable region sequence, or the heavy chain or light chain sequence of GSK2831781.

[0919] In one embodiment, the anti-LAG-3 antibody molecule is IMP761 (Prima BioMed). In one embodiment, the anti-LAG-3 antibody molecule comprises one or more of the CDR sequences (or collectively all of the CDR sequences), the heavy chain or light chain variable region sequence, or the heavy chain or light chain sequence of IMP761.

[0920] Further known anti-LAG-3 antibodies include those described, e.g., in WO 2008/132601, WO 2010/019570, WO 2014/140180, WO 2015/116539, WO 2015/200119, WO 2016/028672, U.S. Pat. Nos. 9,244,059, 9,505,839, incorporated by reference in their entirety.

[0921] In one embodiment, the anti-LAG-3 antibody is an antibody that competes for binding with, and/or binds to the same epitope on LAG-3 as, one of the anti-LAG-3 antibodies described herein.

[0922] In one embodiment, the anti-LAG-3 inhibitor is a soluble LAG-3 protein, e.g., IMP321 (Prima BioMed), e.g., as disclosed in WO 2009/044273, incorporated by reference in its entirety.

TABLE 19
Amino acid sequences of other exemplary anti-LAG-3 antibody molecules
BMS-986016

| | | |
|---|---|---|
| SEQ ID NO: | Heavy | QVQLQQWGAGLLKPSETLSLTCAVYGGSFSDYYWNWIRQPPGKG |
| 3154 | chain | LEWIGEINHRGSTNSNPSLKSRVTLSLDTSKNQFSLKLRSVTAADTA |
| | | VYYCAFGYSDYEYNWFDPWGQGTLVTVSSASTKGPSVFPLAPCSR |
| | | STSESTAALGCLVKDYFPEPVTVSWNSGALTSGVHTFPAVLQSSGL |
| | | YSLSSVVTVPSSSLGTKTYTCNVDHKPSNTKVDKRVESKYGPPCPP |
| | | CPAPEFLGGPSVFLFPPKPKDTLMISRTPEVTCVVVDVSQEDPEVQF |
| | | NWYVDGVEVHNAKTKPREEQFNSTYRVVSVLTVLHQDWLNGKE |
| | | YKCKVSNKGLPSSIEKTISKAKGQPREPQVYTLPPSQEEMTKNQVS |
| | | LTCLVKGFYPSDIAVEWESNGQPENNYKTTPPVLDSDGSFFLYSRL |
| | | TVDKSRWQEGNVFSCSVMHEALHNHYTQKSLSLSLGK |
| SEQ ID NO: | Light | EIVLTQSPATLSLSPGERATLSCRASQSISSYLAWYQQKPGQAPRLLI |
| 3155 | chain | YDASNRATGIPARFSGSGSGTDFTLTISSLEPEDFAVYYCQQRSNWP |
| | | LTFGQGTNLEIKRTVAAPSVFIFPPSDEQLKSGTASVVCLLNNFYPR |
| | | EAKVQWKVDNALQSGNSQESVTEQDSKDSTYSLSSTLTLSKADYE |
| | | KHKVYACEVTHQGLSSPVTKSFNRGEC |

IMP731

| | | |
|---|---|---|
| SEQ ID NO: | Heavy | QVQLKESGPGLVAPSQSLSITCTVSGFSLTAYGVNWVRQPPGKGLE |
| 3156 | chain | WLGMIWDDGSTDYNSALKSRLSISKDNSKSQVFLKMNSLQTDDTA |
| | | RYYCAREGDVAFDYWGQGTTLTVSSASTKGPSVFPLAPSSKSTSG |
| | | GTAALGCLVKDYFPEPVTVSWNSGALTSGVHTFPAVLQSSGLYSLS |
| | | SVVTVPSSSLGTQTYICNVNHKPSNTKVDKKVEPKSCDKTHTCPPC |
| | | PAPELLGGPSVFLFPPKPKDTLMISRTPEVTCVVVDVSHEDPEVKFN |
| | | WYVDGVEVHNAKTKPREEQYNSTYRVVSVLTVLHQDWLNGKEY |
| | | KCKVSNKALPAPIEKTISKAKGQPREPQVYTLPPSRDELTKNQVSLT |
| | | CLVKGFYPSDIAVEWESNGQPENNYKTTPPVLDSDGSFFLYSKLTV |
| | | DKSRWQQGNVFSCSVMHEALHNHYTQKSLSLSPGK |
| SEQ ID NO: | Light | DIVMTQSPSSLAVSVGQKVTMSCKSSQSLLNGSNQKNYLAWYQQ |
| 3157 | chain | KPGQSPKLLVYFASTRDSGVPDRFIGSGSGTDFTLTISSVQAEDLAD |
| | | YFCLQHFGTPPTFGGGTKLEIKRTVAAPSVFIFPPSDEQLKSGTASV |
| | | VCLLNNFYPREAKVQWKVDNALQSGNSQESVTEQDSKDSTYSLSS |
| | | TLTLSKADYEKHKVYACEVTHQGLSSPVTKSFNRGEC |

### TIM-3 Inhibitors

[0923] In certain embodiments, the inhibitor of an immune checkpoint molecule is an inhibitor of TIM-3. In some embodiments, the ZBTB32 inhibitor, or a pharmaceutically acceptable salt, hydrate, solvate, prodrug, stereoisomer, or tautomer thereof, of the present disclosure are used in combination with a TIM-3 inhibitor to treat a disease, e.g., cancer. In some embodiments, the TIM-3 inhibitor is MGB453 (Novartis), LY3321367 (Eli Lilly), Sym023 (Symphogen), BGB-A425 (Beigene), INCAGN-2390 (Agenus/Incyte), MBS-986258 (BMS/Five Prime), RO-7121661 (Roche), LY-3415244 (Eli Lilly), or TSR-022 (Tesaro).

[0924] Exemplary TIM-3 Inhibitors

[0925] In one embodiment, the TIM-3 inhibitor is an anti-TIM-3 antibody molecule. In one embodiment, the TIM-3 inhibitor is an anti-TIM-3 antibody molecule as disclosed in US 2015/0218274, published on Aug. 6, 2015, entitled “Antibody Molecules to TIM-3 and Uses Thereof,” incorporated by reference in its entirety.

[0926] In one embodiment, the anti-TIM-3 antibody molecule comprises at least one, two, three, four, five or six complementarity determining regions (CDRs) (or collectively all of the CDRs) from a heavy and light chain variable region comprising an amino acid sequence shown in Table 20 (e.g., from the heavy and light chain variable region sequences of ABTIM3-hum11 or ABTIM3-hum03 disclosed in Table 20), or encoded by a nucleotide sequence shown in Table 20. In some embodiments, the CDRs are according to the Kabat definition (e.g., as set out in Table 20). In some embodiments, the CDRs are according to the Chothia definition (e.g., as set out in Table 20). In one embodiment, one or more of the CDRs (or collectively all of the CDRs) have one, two, three, four, five, six or more changes, e.g., amino acid substitutions (e.g., conservative amino acid substitutions) or deletions, relative to an amino acid sequence shown in Table 20, or encoded by a nucleotide sequence shown in Table 20.

[0927] In one embodiment, the anti-TIM-3 antibody molecule comprises a heavy chain variable region (VH) comprising a VHCDR1 amino acid sequence of SEQ ID NO: 3159, a VHCDR2 amino acid sequence of SEQ ID NO: 3160, and a VHCDR3 amino acid sequence of SEQ ID NO: 3161; and a light chain variable region (VL) comprising a VLCDR1 amino acid sequence of SEQ ID NO: 3168, a VLCDR2 amino acid sequence of SEQ ID NO: 3169, and a VLCDR3 amino acid sequence of SEQ ID NO: 3170, each disclosed in Table 20. In one embodiment, the anti-TIM-3 antibody molecule comprises a heavy chain variable region (VH) comprising a VHCDR1 amino acid sequence of SEQ ID NO: 3159, a VHCDR2 amino acid sequence of SEQ ID NO: 3178, and a VHCDR3 amino acid sequence of SEQ ID NO: 3161; and a light chain variable region (VL) comprising a VLCDR1 amino acid sequence of SEQ ID NO: 3168, a VLCDR2 amino acid sequence of SEQ ID NO: 3169, and a VLCDR3 amino acid sequence of SEQ ID NO: 3170, each disclosed in Table 20.

[0928] In one embodiment, the anti-TIM-3 antibody molecule comprises a VH comprising the amino acid sequence of SEQ ID NO: 3164, or an amino acid sequence at least 85%, 90%, 95%, or 99% identical or higher to SEQ ID NO: 3164. In one embodiment, the anti-TIM-3 antibody molecule comprises a VL comprising the amino acid sequence of SEQ ID NO: 3174, or an amino acid sequence at least 85%, 90%, 95%, or 99% identical or higher to SEQ ID NO: 3174. In one embodiment, the anti-TIM-3 antibody molecule comprises a VH comprising the amino acid sequence of SEQ ID NO: 3180, or an amino acid sequence at least 85%, 90%, 95%, or 99% identical or higher to SEQ ID NO: 3180.

[0929] In one embodiment, the anti-TIM-3 antibody molecule comprises a VL comprising the amino acid sequence of SEQ ID NO: 3184, or an amino acid sequence at least 85%, 90%, 95%, or 99% identical or higher to SEQ ID NO: 3184. In one embodiment, the anti-TIM-3 antibody molecule comprises a VH comprising the amino acid sequence of SEQ ID NO: 3164 and a VL comprising the amino acid sequence of SEQ ID NO: 3174. In one embodiment, the anti-TIM-3 antibody molecule comprises a VH comprising the amino acid sequence of SEQ ID NO: 3180 and a VL comprising the amino acid sequence of SEQ ID NO: 3184.

[0930] In one embodiment, the antibody molecule comprises a VH encoded by the nucleotide sequence of SEQ ID NO: 3165, or a nucleotide sequence at least 85%, 90%, 95%, or 99% identical or higher to SEQ ID NO: 3165. In one embodiment, the antibody molecule comprises a VL encoded by the nucleotide sequence of SEQ ID NO: 3175, or a nucleotide sequence at least 85%, 90%, 95%, or 99% identical or higher to SEQ ID NO: 3175. In one embodiment, the antibody molecule comprises a VH encoded by the nucleotide sequence of SEQ ID NO: 3181, or a nucleotide sequence at least 85%, 90%, 95%, or 99% identical or higher to SEQ ID NO: 3181. In one embodiment, the antibody molecule comprises a VL encoded by the nucleotide sequence of SEQ ID NO: 3185, or a nucleotide sequence at least 85%, 90%, 95%, or 99% identical or higher to SEQ ID NO: 3185. In one embodiment, the antibody molecule comprises a VH encoded by the nucleotide sequence of SEQ ID NO: 3165 and a VL encoded by the nucleotide sequence of SEQ ID NO: 3175. In one embodiment, the antibody molecule comprises a VH encoded by the nucleotide sequence of SEQ ID NO: 3181 and a VL encoded by the nucleotide sequence of SEQ ID NO: 3185.

[0931] In one embodiment, the anti-TIM-3 antibody molecule comprises a heavy chain comprising the amino acid sequence of SEQ ID NO: 3166, or an amino acid sequence at least 85%, 90%, 95%, or 99% identical or higher to SEQ ID NO: 3166. In one embodiment, the anti-TIM-3 antibody molecule comprises a light chain comprising the amino acid sequence of SEQ ID NO: 3176, or an amino acid sequence at least 85%, 90%, 95%, or 99% identical or higher to SEQ ID NO: 3176. In one embodiment, the anti-TIM-3 antibody molecule comprises a heavy chain comprising the amino acid sequence of SEQ ID NO: 3182, or an amino acid sequence at least 85%, 90%, 95%, or 99% identical or higher to SEQ ID NO: 3182. In one embodiment, the anti-TIM-3 antibody molecule comprises a light chain comprising the amino acid sequence of SEQ ID NO: 3186, or an amino acid sequence at least 85%, 90%, 95%, or 99% identical or higher to SEQ ID NO: 3186. In one embodiment, the anti-TIM-3 antibody molecule comprises a heavy chain comprising the amino acid sequence of SEQ ID NO: 3166 and a light chain comprising the amino acid sequence of SEQ ID NO: 3176. In one embodiment, the anti-TIM-3 antibody molecule comprises a heavy chain comprising the amino acid sequence of SEQ ID NO: 3182 and a light chain comprising the amino acid sequence of SEQ ID NO: 3186.

[0932] In one embodiment, the antibody molecule comprises a heavy chain encoded by the nucleotide sequence of SEQ ID NO: 3167, or a nucleotide sequence at least 85%, 90%, 95%, or 99% identical or higher to SEQ ID NO: 3167. In one embodiment, the antibody molecule comprises a light chain encoded by the nucleotide sequence of SEQ ID NO: 3177, or a nucleotide sequence at least 85%, 90%, 95%, or 99% identical or higher to SEQ ID NO: 3177. In one embodiment, the antibody molecule comprises a heavy chain encoded by the nucleotide sequence of SEQ ID NO: 3183, or a nucleotide sequence at least 85%, 90%, 95%, or 99% identical or higher to SEQ ID NO: 3183. In one embodiment, the antibody molecule comprises a light chain encoded by the nucleotide sequence of SEQ ID NO: 3187, or a nucleotide sequence at least 85%, 90%, 95%, or 99% identical or higher to SEQ ID NO: 3187. In one embodiment, the antibody molecule comprises a heavy chain encoded by the nucleotide sequence of SEQ ID NO: 3167 and a light chain encoded by the nucleotide sequence of SEQ ID NO: 3177. In one embodiment, the antibody molecule comprises a heavy chain encoded by the nucleotide sequence of SEQ ID NO: 3183 and a light chain encoded by the nucleotide sequence of SEQ ID NO: 3187.

[0933] The antibody molecules described herein can be made by vectors, host cells, and methods described in US 2015/0218274, incorporated by reference in its entirety.

TABLE 20
Amino acid and nucleotide sequences of exemplary anti-TIM-3 antibody molecules
ABTIM3-hum11

| | | |
|---|---|---|
| SEQ ID NO: 3159 | HCDR1 | SYNMH |
| (Kabat) | | |
| SEQ ID NO: 3160 | HCDR2 | DIYPGNGDTSYNQKFKG |
| (Kabat) | | |
| SEQ ID NO: 3161 | HCDR3 | VGGAFPMDY |
| (Kabat) | | |
| SEQ ID NO: | HCDR1 | GYTFTSY |
| 3162(Chothia) | | |
| SEQ ID NO: | HCDR2 | YPGNGD |
| 3163(Chothia) | | |
| SEQ ID NO: 3161 | HCDR3 | VGGAFPMDY |
| (Chothia) | | |
| SEQ ID NO: 3164 | VH | QVQLVQSGAEVKKPGSSVKVSCKASGYTFTSYNMHWVRQAPGQ |
| | | GLEWMGDIYPGNGDTSYNQKFKGRVTITADKSTSTVYMELSSLR |
| | | SEDTAVYYCARVGGAFPMDYWGQGTTVTVSS |
| SEQ ID NO: 3165 | DNA | CAGGTGCAGCTGGTGCAGTCAGGCGCCGAAGTGAAGAAACCC |
| | VH | GGCTCTAGCGTGAAAGTTTCTTGTAAAGCTAGTGGCTACACCT |
| | | TCACTAGCTATAATATGCACTGGGTTCGCCAGGCCCCAGGGCA |
| | | AGGCCTCGAGTGGATGGGCGATATCTACCCCGGGAACGGCGA |
| | | CACTAGTTATAATCAGAAGTTTAAGGGTAGAGTCACTATCACC |
| | | GCCGATAAGTCTACTAGCACCGTCTATATGGAACTGAGTTCCC |
| | | TGAGGTCTGAGGACACCGCCGTCTACTACTGCGCTAGAGTGG |
| | | GCGGAGCCTTCCCTATGGACTACTGGGGTCAAGGCACTACCGT |
| | | GACCGTGTCTAGC |
| SEQ ID NO: 3166 | Heavy | QVQLVQSGAEVKKPGSSVKVSCKASGYTFTSYNMHWVRQAPGQ |
| | chain | GLEWMGDIYPGNGDTSYNQKFKGRVTITADKSTSTVYMELSSLR |
| | | SEDTAVYYCARVGGAFPMDYWGQGTTVTVSSASTKGPSVFPLA |
| | | PCSRSTSESTAALGCLVKDYFPEPVTVSWNSGALTSGVHTFPAVL |
| | | QSSGLYSLSSVVTVPSSSLGTKTYTCNVDHKPSNTKVDKRVESKY |
| | | GPPCPPCPAPEFLGGPSVFLFPPKPKDTLMISRTPEVTCVVVDVSQ |
| | | EDPEVQFNWYVDGVEVHNAKTKPREEQFNSTYRVVSVLTVLHQ |
| | | DWLNGKEYKCKVSNKGLPSSIEKTISKAKGQPREPQVYTLPPSQE |
| | | EMTKNQVSLTCLVKGFYPSDIAVEWESNGQPENNYKTTPPVLDS |
| | | DGSFFLYSRLTVDKSRWQEGNVFSCSVMHEALHNHYTQKSLSLS |
| | | LG |
| SEQ ID NO: 3167 | DNA | CAGGTGCAGCTGGTGCAGTCAGGCGCCGAAGTGAAGAAACCC |
| | heavy | GGCTCTAGCGTGAAAGTTTCTTGTAAAGCTAGTGGCTACACCT |
| | chain | TCACTAGCTATAATATGCACTGGGTTCGCCAGGCCCCAGGGCA |
| | | AGGCCTCGAGTGGATGGGCGATATCTACCCCGGGAACGGCGA |
| | | CACTAGTTATAATCAGAAGTTTAAGGGTAGAGTCACTATCACC |
| | | GCCGATAAGTCTACTAGCACCGTCTATATGGAACTGAGTTCCC |
| | | TGAGGTCTGAGGACACCGCCGTCTACTACTGCGCTAGAGTGG |
| | | GCGGAGCCTTCCCTATGGACTACTGGGGTCAAGGCACTACCGT |
| | | GACCGTGTCTAGCGCTAGCACTAAGGGCCCGTCCGTGTTCCCC |
| | | CTGGCACCTTGTAGCCGGAGCACTAGCGAATCCACCGCTGCCC |
| | | TCGGCTGCCTGGTCAAGGATTACTTCCCGGAGCCCGTGACCGT |
| | | GTCCTGGAACAGCGGAGCCCTGACCTCCGGAGTGCACACCTTC |
| | | CCCGCTGTGCTGCAGAGCTCCGGGCTGTACTCGCTGTCGTCGG |
| | | TGGTCACGGTGCCTTCATCTAGCCTGGGTACCAAGACCTACAC |
| | | TTGCAACGTGGACCACAAGCCTTCCAACACTAAGGTGGACAA |
| | | GCGCGTCGAATCGAAGTACGGCCCACCGTGCCCGCCTTGTCCC |
| | | GCGCCGGAGTTCCTCGGCGGTCCCTCGGTCTTTCTGTTCCCAC |
| | | CGAAGCCCAAGGACACTTTGATGATTTCCCGCACCCCTGAAGT |
| | | GACATGCGTGGTCGTGGACGTGTCACAGGAAGATCCGGAGGT |
| | | GCAGTTCAATTGGTACGTGGATGGCGTCGAGGTGCACAACGC |
| | | CAAAACCAAGCCGAGGGAGGAGCAGTTCAACTCCACTTACCG |
| | | CGTCGTGTCCGTGCTGACGGTGCTGCATCAGGACTGGCTGAAC |
| | | GGGAAGGAGTACAAGTGCAAAGTGTCCAACAAGGGACTTCCT |
| | | AGCTCAATCGAAAAGACCATCTCGAAAGCCAAGGGACAGCCC |
| | | CGGGAACCCCAAGTGTATACCCTGCCACCGAGCCAGGAAGAA |
| | | ATGACTAAGAACCAAGTCTCATTGACTTGCCTTGTGAAGGGCT |
| | | TCTACCCATCGGATATCGCCGTGGAATGGGAGTCCAACGGCC |
| | | AGCCGGAAAACAACTACAAGACCACCCCTCCGGTGCTGGACT |
| | | CAGACGGATCCTTCTTCCTCTACTCGCGGCTGACCGTGGATAA |
| | | GAGCAGATGGCAGGAGGGAAATGTGTTCAGCTGTTCTGTGAT |
| | | GCATGAAGCCCTGCACAACCACTACACTCAGAAGTCCCTGTCC |
| | | CTCTCCCTGGGA |
| SEQ ID NO: 3168 | LCDR1 | RASESVEYYGTSLMQ |
| (Kabat) | | |
| SEQ ID NO: | LCDR2 | AASNVES |
| 3169(Kabat) | | |
| SEQ ID NO: 3170 | LCDR3 | QQSRKDPST |
| (Kabat) | | |
| SEQ ID NO: 3171 | LCDR1 | SESVEYYGTSL |
| (Chothia) | | |
| SEQ ID NO: 3172 | LCDR2 | AAS |
| (Chothia) | | |
| SEQ ID NO: 3173 | LCDR3 | SRKDPS |
| (Chothia) | | |
| SEQ ID NO: 3174 | VL | AIQLTQSPSSLSASVGDRVTITCRASESVEYYGTSLMQWYQQKPG |
| | | KAPKLLIYAASNVESGVPSRFSGSGSGTDFTLTISSLQPEDFATYF |
| | | CQQSRKDPSTFGGGTKVEIK |
| SEQ ID NO: 3175 | DNA | GCTATTCAGCTGACTCAGTCACCTAGTAGCCTGAGCGCTAGTG |
| | VL | TGGGCGATAGAGTGACTATCACCTGTAGAGCTAGTGAATCAG |
| | | TCGAGTACTACGGCACTAGCCTGATGCAGTGGTATCAGCAGA |
| | | AGCCCGGGAAAGCCCCTAAGCTGCTGATCTACGCCGCCTCTAA |
| | | CGTGGAATCAGGCGTGCCCTCTAGGTTTAGCGGTAGCGGTAGT |
| | | GGCACCGACTTCACCCTGACTATCTCTAGCCTGCAGCCCGAGG |
| | | ACTTCGCTACCTACTTCTGTCAGCAGTCTAGGAAGGACCCTAG |
| | | CACCTTCGGCGGAGGCACTAAGGTCGAGATTAAG |
| SEQ ID NO: 3176 | Light | AIQLTQSPSSLSASVGDRVTITCRASESVEYYGTSLMQWYQQKPG |
| | chain | KAPKLLIYAASNVESGVPSRFSGSGSGTDFTLTISSLQPEDFATYF |
| | | CQQSRKDPSTFGGGTKVEIKRTVAAPSVFIFPPSDEQLKSGTASVV |
| | | CLLNNFYPREAKVQWKVDNALQSGNSQESVTEQDSKDSTYSLSS |
| | | TLTLSKADYEKHKVYACEVTHQGLSSPVTKSFNRGEC |
| SEQ ID NO: 3177 | DNA | GCTATTCAGCTGACTCAGTCACCTAGTAGCCTGAGCGCTAGTG |
| | light | TGGGCGATAGAGTGACTATCACCTGTAGAGCTAGTGAATCAG |
| | chain | TCGAGTACTACGGCACTAGCCTGATGCAGTGGTATCAGCAGA |
| | | AGCCCGGGAAAGCCCCTAAGCTGCTGATCTACGCCGCCTCTAA |
| | | CGTGGAATCAGGCGTGCCCTCTAGGTTTAGCGGTAGCGGTAGT |
| | | GGCACCGACTTCACCCTGACTATCTCTAGCCTGCAGCCCGAGG |
| | | ACTTCGCTACCTACTTCTGTCAGCAGTCTAGGAAGGACCCTAG |
| | | CACCTTCGGCGGAGGCACTAAGGTCGAGATTAAGCGTACGGT |
| | | GGCCGCTCCCAGCGTGTTCATCTTCCCCCCCAGCGACGAGCAG |
| | | CTGAAGAGCGGCACCGCCAGCGTGGTGTGCCTGCTGAACAAC |
| | | TTCTACCCCCGGGAGGCCAAGGTGCAGTGGAAGGTGGACAAC |
| | | GCCCTGCAGAGCGGCAACAGCCAGGAGAGCGTCACCGAGCAG |
| | | GACAGCAAGGACTCCACCTACAGCCTGAGCAGCACCCTGACC |
| | | CTGAGCAAGGCCGACTACGAGAAGCATAAGGTGTACGCCTGC |
| | | GAGGTGACCCACCAGGGCCTGTCCAGCCCCGTGACCAAGAGC |
| | | TTCAACAGGGGCGAGTGC |

ABTIM3-hum03

| | | |
|---|---|---|
| SEQ ID NO: 3159 | HCDR1 | SYNMH |
| (Kabat) | | |
| SEQ ID NO: 3178 | HCDR2 | DIYPGQGDTSYNQKFKG |
| (Kabat) | | |
| SEQ ID NO: 3161 | HCDR3 | VGGAFPMDY |
| (Kabat) | | |
| SEQ ID NO: 3162 | HCDRI | GYTFTSY |
| (Chothia) | | |
| SEQ ID NO: 3179 | HCDR2 | YPGQGD |
| (Chothia) | | |
| SEQ ID NO: 3161 | HCDR3 | VGGAFPMDY |
| (Chothia) | | |
| SEQ ID NO: 3180 | VH | QVQLVQSGAEVKKPGASVKVSCKASGYTFTSYNMHWVRQAPG |
| | | QGLEWIGDIYPGQGDTSYNQKFKGRATMTADKSTSTVYMELSSL |
| | | RSEDTAVYYCARVGGAFPMDYWGQGTLVTVSS |
| SEQ ID NO: 3181 | DNA | CAGGTGCAGCTGGTGCAGTCAGGCGCCGAAGTGAAGAAACCC |
| | VH | GGCGCTAGTGTGAAAGTTAGCTGTAAAGCTAGTGGCTATACTT |
| | | TCACTTCTTATAATATGCACTGGGTCCGCCAGGCCCCAGGTCA |
| | | AGGCCTCGAGTGGATCGGCGATATCTACCCCGGTCAAGGCGA |
| | | CACTTCCTATAATCAGAAGTTTAAGGGTAGAGCTACTATGACC |
| | | GCCGATAAGTCTACTICTACCGTCTATATGGAACTGAGTTCCC |
| | | TGAGGTCTGAGGACACCGCCGTCTACTACTGCGCTAGAGTGG |
| | | GCGGAGCCTTCCCAATGGACTACTGGGGTCAAGGCACCCTGG |
| | | TCACCGTGTCTAGC |
| SEQ ID NO: 3182 | Heavy | QVQLVQSGAEVKKPGASVKVSCKASGYTFTSYNMHWVRQAPG |
| | chain | QGLEWIGDIYPGQGDTSYNQKFKGRATMTADKSTSTVYMELSSL |
| | | RSEDTAVYYCARVGGAFPMDYWGQGTLVTVSSASTKGPSVFPL |
| | | APCSRSTSESTAALGCLVKDYFPEPVTVSWNSGALTSGVHTFPAV |
| | | LQSSGLYSLSSVVTVPSSSLGTKTYTCNVDHKPSNTKVDKRVESK |
| | | YGPPCPPCPAPEFLGGPSVFLFPPKPKDTLMISRTPEVTCVVVDVS |
| | | QEDPEVQFNWYVDGVEVHNAKTKPREEQFNSTYRVVSVLTVLH |
| | | QDWLNGKEYKCKVSNKGLPSSIEKTISKAKGQPREPQVYTLPPSQ |
| | | EEMTKNQVSLTCLVKGFYPSDIAVEWESNGQPENNYKTTPPVLD |
| | | SDGSFFLYSRLTVDKSRWQEGNVFSCSVMHEALHNHYTQKSLSL |
| | | SLG |
| SEQ ID NO: 3183 | DNA | CAGGTGCAGCTGGTGCAGTCAGGCGCCGAAGTGAAGAAACCC |
| | heavy | GGCGCTAGTGTGAAAGTTAGCTGTAAAGCTAGTGGCTATACTT |
| | chain | TCACTTCTTATAATATGCACTGGGTCCGCCAGGCCCCAGGTCA |
| | | AGGCCTCGAGTGGATCGGCGATATCTACCCCGGTCAAGGCGA |
| | | CACTTCCTATAATCAGAAGTTTAAGGGTAGAGCTACTATGACC |
| | | GCCGATAAGTCTACTTCTACCGTCTATATGGAACTGAGTTCCC |
| | | TGAGGTCTGAGGACACCGCCGTCTACTACTGCGCTAGAGTGG |
| | | GCGGAGCCTTCCCAATGGACTACTGGGGTCAAGGCACCCTGG |
| | | TCACCGTGTCTAGCGCTAGCACTAAGGGCCCGTCCGTGTTCCC |
| | | CCTGGCACCTTGTAGCCGGAGCACTAGCGAATCCACCGCTGCC |
| | | CTCGGCTGCCTGGTCAAGGATTACTTCCCGGAGCCCGTGACCG |
| | | TGTCCTGGAACAGCGGAGCCCTGACCTCCGGAGTGCACACCTT |
| | | CCCCGCTGTGCTGCAGAGCTCCGGGCTGTACTCGCTGTCGTCG |
| | | GTGGTCACGGTGCCTTCATCTAGCCTGGGTACCAAGACCTACA |
| | | CTTGCAACGTGGACCACAAGCCTTCCAACACTAAGGTGGACA |
| | | AGCGCGTCGAATCGAAGTACGGCCCACCGTGCCCGCCTTGTCC |
| | | CGCGCCGGAGTTCCTCGGCGGTCCCTCGGTCTTTCTGTTCCCA |
| | | CCGAAGCCCAAGGACACTTTGATGATTTCCCGCACCCCTGAAG |
| | | TGACATGCGTGGTCGTGGACGTGTCACAGGAAGATCCGGAGG |
| | | TGCAGTTCAATTGGTACGTGGATGGCGTCGAGGTGCACAACG |
| | | CCAAAACCAAGCCGAGGGAGGAGCAGTTCAACTCCACTTACC |
| | | GCGTCGTGTCCGTGCTGACGGTGCTGCATCAGGACTGGCTGAA |
| | | CGGGAAGGAGTACAAGTGCAAAGTGTCCAACAAGGGACTTCC |
| | | TAGCTCAATCGAAAAGACCATCTCGAAAGCCAAGGGACAGCC |
| | | CCGGGAACCCCAAGTGTATACCCTGCCACCGAGCCAGGAAGA |
| | | AATGACTAAGAACCAAGTCTCATTGACTTGCCTTGTGAAGGGC |
| | | TTCTACCCATCGGATATCGCCGTGGAATGGGAGTCCAACGGCC |
| | | AGCCGGAAAACAACTACAAGACCACCCCTCCGGTGCTGGACT |
| | | CAGACGGATCCTTCTTCCTCTACTCGCGGCTGACCGTGGATAA |
| | | GAGCAGATGGCAGGAGGGAAATGTGTTCAGCTGTTCTGTGAT |
| | | GCATGAAGCCCTGCACAACCACTACACTCAGAAGTCCCTGTCC |
| | | CTCTCCCTGGGA |
| SEQ ID NO: 3168 | LCDR1 | RASESVEYYGTSLMQ |
| (Kabat) | | |
| SEQ ID NO: 3169 | LCDR2 | AASNVES |
| (Kabat) | | |
| SEQ ID NO: 3170 | LCDR3 | QQSRKDPST |
| (Kabat) | | |
| SEQ ID NO: | LCDR1 | SESVEYYGTSL |
| 3171(Chothia) | | |
| SEQ ID NO: 3172 | LCDR2 | AAS |
| (Chothia) | | |
| SEQ ID NO: 3173 | LCDR3 | SRKDPS |
| (Chothia). | | |
| SEQ ID NO: 3184 | VL | DIVLTQSPDSLAVSLGERATINCRASESVEYYGTSLMQWYQQKP |
| | | GQPPKLLIYAASNVESGVPDRFSGSGSGTDFTLTISSLQAEDVAVY |
| | | YCQQSRKDPSTFGGGTKVEIK |
| SEQ ID NO: 3185 | DNA | GATATCGTCCTGACTCAGTCACCCGATAGCCTGGCCGTCAGCC |
| | VL | TGGGCGAGCGGGCTACTATTAACTGTAGAGCTAGTGAATCAG |
| | | TCGAGTACTACGGCACTAGCCTGATGCAGTGGTATCAGCAGA |
| | | AGCCCGGTCAACCCCCTAAGCTGCTGATCTACGCCGCCTCTAA |
| | | CGTGGAATCAGGCGTGCCCGATAGGTTTAGCGGTAGCGGTAG |
| | | TGGCACCGACTTCACCCTGACTATTAGTAGCCTGCAGGCCGAG |
| | | GACGTGGCCGTCTACTACTGTCAGCAGTCTAGGAAGGACCCTA |
| | | GCACCTTCGGCGGAGGCACTAAGGTCGAGATTAAG |
| SEQ ID NO: 3186 | Light | DIVLTQSPDSLAVSLGERATINCRASESVEYYGTSLMQWYQQKP |
| | chain | GQPPKLLIYAASNVESGVPDRFSGSGSGTDFTLTISSLQAEDVAVY |
| | | YCQQSRKDPSTFGGGTKVEIKRTVAAPSVFIFPPSDEQLKSGTASV |
| | | VCLLNNFYPREAKVQWKVDNALQSGNSQESVTEQDSKDSTYSLS |
| | | STLTLSKADYEKHKVYACEVTHQGLSSPVTKSFNRGEC |
| SEQ ID NO: 3187 | DNA | GATATCGTCCTGACTCAGTCACCCGATAGCCTGGCCGTCAGCC |
| | light | TGGGCGAGCGGGCTACTATTAACTGTAGAGCTAGTGAATCAG |
| | chain | TCGAGTACTACGGCACTAGCCTGATGCAGTGGTATCAGCAGA |
| | | AGCCCGGTCAACCCCCTAAGCTGCTGATCTACGCCGCCTCTAA |
| | | CGTGGAATCAGGCGTGCCCGATAGGTTTAGCGGTAGCGGTAG |
| | | TGGCACCGACTTCACCCTGACTATTAGTAGCCTGCAGGCCGAG |
| | | GACGTGGCCGTCTACTACTGTCAGCAGTCTAGGAAGGACCCTA |
| | | GCACCTTCGGCGGAGGCACTAAGGTCGAGATTAAGCGTACGG |
| | | TGGCCGCTCCCAGCGTGTTCATCTTCCCCCCCAGCGACGAGCA |
| | | GCTGAAGAGCGGCACCGCCAGCGTGGTGTGCCTGCTGAACAA |
| | | CTTCTACCCCCGGGAGGCCAAGGTGCAGTGGAAGGTGGACAA |
| | | CGCCCTGCAGAGCGGCAACAGCCAGGAGAGCGTCACCGAGCA |
| | | GGACAGCAAGGACTCCACCTACAGCCTGAGCAGCACCCTGAC |
| | | CCTGAGCAAGGCCGACTACGAGAAGCATAAGGTGTACGCCTG |
| | | CGAGGTGACCCACCAGGGCCTGTCCAGCCCCGTGACCAAGAG |
| | | CTTCAACAGGGGCGAGTGC |

[0934] Other Exemplary TIM-3 Inhibitors

[0935] In one embodiment, the anti-TIM-3 antibody molecule is TSR-022 (AnaptysBio/Tesaro). In one embodiment, the anti-TIM-3 antibody molecule comprises one or more of the CDR sequences (or collectively all of the CDR sequences), the heavy chain or light chain variable region sequence, or the heavy chain or light chain sequence of TSR-022. In one embodiment, the anti-TIM-3 antibody molecule comprises one or more of the CDR sequences (or collectively all of the CDR sequences), the heavy chain or light chain variable region sequence, or the heavy chain or light chain sequence of APE5137 or APE5121, e.g., as disclosed in Table 21. APE5137, APE5121, and other anti-TIM-3 antibodies are disclosed in WO 2016/161270, incorporated by reference in its entirety.

[0936] In one embodiment, the anti-TIM-3 antibody molecule is the antibody clone F38-2E2. In one embodiment, the anti-TIM-3 antibody molecule comprises one or more of the CDR sequences (or collectively all of the CDR sequences), the heavy chain or light chain variable region sequence, or the heavy chain or light chain sequence of F38-2E2.

[0937] In one embodiment, the anti-TIM-3 antibody molecule is LY3321367 (Eli Lilly). In one embodiment, the anti-TIM-3 antibody molecule comprises one or more of the CDR sequences (or collectively all of the CDR sequences), the heavy chain variable region sequence and/or light chain variable region sequence, or the heavy chain sequence and/or light chain sequence of LY3321367.

[0938] In one embodiment, the anti-TIM-3 antibody molecule is Sym023 (Symphogen). In one embodiment, the anti-TIM-3 antibody molecule comprises one or more of the CDR sequences (or collectively all of the CDR sequences), the heavy chain variable region sequence and/or light chain variable region sequence, or the heavy chain sequence and/or light chain sequence of Sym023.

[0939] In one embodiment, the anti-TIM-3 antibody molecule is BGB-A425 (Beigene). In one embodiment, the anti-TIM-3 antibody molecule comprises one or more of the CDR sequences (or collectively all of the CDR sequences), the heavy chain variable region sequence and/or light chain variable region sequence, or the heavy chain sequence and/or light chain sequence of BGB-A425.

[0940] In one embodiment, the anti-TIM-3 antibody molecule is INCAGN-2390 (Agenus/Incyte). In one embodiment, the anti-TIM-3 antibody molecule comprises one or more of the CDR sequences (or collectively all of the CDR sequences), the heavy chain variable region sequence and/or light chain variable region sequence, or the heavy chain or light chain sequence of INCAGN-2390.

[0941] In one embodiment, the anti-TIM-3 antibody molecule is BMS-986258 (BMS/Five Prime). In one embodiment, the anti-TIM-3 antibody molecule comprises one or more of the CDR sequences (or collectively all of the CDR sequences), the heavy chain variable region sequence and/or light chain variable region sequence, or the heavy chain sequence and/or light chain sequence of BMS-986258.

[0942] In one embodiment, the anti-TIM-3 antibody or inhibitor molecule is RO-7121661 (Roche). In one embodiment, the anti-TIM-3 antibody molecule comprises one or more of the CDR sequences (or collectively all of the CDR sequences), the heavy chain variable region sequence and/or light chain variable region sequence, or the heavy chain sequence and/or light chain sequence of the TIM-3 binding arm of RO-7121661.

[0943] In one embodiment, the anti-TIM-3 antibody or inhibitor molecule is LY-3415244 (Eli Lilly). In one embodiment, the anti-TIM-3 antibody molecule comprises one or more of the CDR sequences (or collectively all of the CDR sequences), the heavy chain variable region sequence and/or light chain variable region sequence, or the heavy chain sequence and/or light chain sequence of the TIM-3 binding arm of LY-3415244.

[0944] Further known anti-TIM-3 antibodies include those described, e.g., in WO 2016/111947, WO 2016/071448, WO 2016/144803, U.S. Pat. Nos. 8,552,156, 8,841,418, and 9,163,087, incorporated by reference in their entirety.

[0945] In one embodiment, the anti-TIM-3 antibody is an antibody that competes for binding with, and/or binds to the same epitope on TIM-3 as, one of the anti-TIM-3 antibodies described herein.

TABLE 21
Amino acid sequences of other exemplary anti-TIM-3 antibody molecules
APE5137

| | | |
|---|---|---|
| SEQ ID NO: | VH | EVQLLESGGGLVQPGGSLRLSCAAASGFTFSSYDMSWVRQAPGKGLD |
| 3188 | | WVSTISGGGTYTYYQDSVKGRFTISRDNSKNTLYLQMNSLRAEDTAV |
| | | YYCASMDYWGQGTTVTVSSA |
| SEQ ID NO: | VL | DIQMTQSPSSLSASVGDRVTITCRASQSIRRYLNWYHQKPGKAPKLLI |
| 3189 | | YGASTLQSGVPSRFSGSGSGTDFTLTISSLQPEDFAVYYCQQSHSAPLT |
| | | FGGGTKVEIKR |

APE5121

| | | |
|---|---|---|
| SEQ ID NO: | VH | EVQVLESGGGLVQPGGSLRLYCVASGFTFSGSYAMSWVRQAPGKGL |
| 3190 | | EWVSAISGSGGSTYYADSVKGRFTISRDNSKNTLYLQMNSLRAEDTA |
| | | VYYCAKKYYVGPADYWGQGTLVTVSSG |
| SEQ ID NO: | VL | DIVMTQSPDSLAVSLGERATINCKSSQSVLYSSNNKNYLAWYQHKPG |
| 3191 | | QPPKLLIYWASTRESGVPDRFSGSGSGTDFTLTISSLQAEDVAVYYCQ |
| | | QYYSSPLTFGGGTKIEVK |

### Cytokines

[0946] In yet another embodiment, the ZBTB32 inhibitor, or a pharmaceutically acceptable salt, hydrate, solvate, prodrug, stereoisomer, or tautomer thereof, of the present disclosure are used in combination with one or more cytokines, including but not limited to, interferon, IL-2, IL-15, IL-7, or IL21. In certain embodiments, ZBTB32 inhibitor, or a pharmaceutically acceptable salt, hydrate, solvate, prodrug, stereoisomer, or tautomer thereof, are administered in combination with an IL-15/IL-15Ra complex. In some embodiments, the IL-15/IL-15Ra complex is selected from NIZ985 (Novartis), ATL-803 (Altor) or CYP0150 (Cytune).

[0947] Exemplary IL-15 IL-15Ra Complexes

[0948] In one embodiment, the cytokine is IL-15 complexed with a soluble form of IL-15 receptor alpha (IL-15Ra). The IL-15/IL-15Ra complex may comprise IL-15 covalently or noncovalently bound to a soluble form of IL-15Ra. In a particular embodiment, the human IL-15 is noncovalently bonded to a soluble form of IL-15Ra. In a particular embodiment, the human IL-15 of the formulation comprises an amino acid sequence of SEQ ID NO: 3192 in Table 22 or an amino acid sequence at least 85%, 90%, 95%, or 99% identical or higher to SEQ ID NO: 3192, and the soluble form of human IL-15Ra comprises an amino acid sequence of SEQ ID NO: 3193 in Table 22, or an amino acid sequence at least 85%, 90%, 95%, or 99% identical or higher to SEQ ID NO: 3193, as described in WO 2014/066527, incorporated by reference in its entirety. The molecules described herein can be made by vectors, host cells, and methods described in WO 2007084342, incorporated by reference in its entirety.

TABLE 22
Exemplary Amino acid and nucleotide sequences of exemplary IL-15/IL-15Ra
complexes

| | | |
|---|---|---|
| NIZ985 | | |
| SEQ ID NO: | Human | NWVNVISDLKKIEDLIQSMHIDATLYTESDVHPSCKVTAMKCFL |
| 3192 | IL-15 | LELQVISLESGDASIHDTVENLIILANNSLSSNGNVTESGCKECEE |
| | | LEEKNIKEFLQSFVHIVQMFINTS |
| SEQ ID NO: | Human | ITCPPPMSVEHADIWVKSYSLYSRERYICNSGFKRKAGTSSLTEC |
| 3193 | Soluble | VLNKATNVAHWTTPSLKCIRDPALVHQRPAPPSTVTTAGVTPQP |
| | IL-15Ra | ESLSPSGKEPAASSPSSNNTAATTAAIVPGSQLMPSKSPSTGTTEI |
| | | SSHESSHGTPSQTTAKNWELTASASHQPPGVYPQG |

[0949] Other Exemplary IL-15 IL-15Ra Complexes

[0950] In one embodiment, the IL-15/IL-15Ra complex is ALT-803, an IL-15/IL-15Ra Fc fusion protein (IL-15N72D:IL-15RaSu/Fc soluble complex). ALT-803 is described in WO 2008/143794, incorporated by reference in its entirety. In one embodiment, the IL-15/IL-15Ra Fc fusion protein comprises the sequences as disclosed in Table 23.

[0951] In one embodiment, the IL-15/IL-15Ra complex comprises IL-15 fused to the sushi domain of IL-15Ra (CYP0150, Cytune). The sushi domain of IL-15Ra refers to a domain beginning at the first cysteine residue after the signal peptide of IL-15Ra, and ending at the fourth cysteine residue after said signal peptide. The complex of IL-15 fused to the sushi domain of IL-15Ra is described in WO 2007/04606 and WO 2012/175222, incorporated by reference in their entirety. In one embodiment, the IL-15/IL-15Ra sushi domain fusion comprises the sequences as disclosed in Table 23.

TABLE 23
Exemplary Amino acid sequences of other exemplary IL-15/IL-15Ra complexes
ALT-803

| | | |
|---|---|---|
| SEQ ID NO: | IL-15N72D | NWVNVISDLKKIEDLIQSMHIDATLYTESDVHPSCKVTAMKCF |
| 3194 | | LLELQVISLESGDASIHDTVENLIILANDSLSSNGNVTESGCKEC |
| | | EELEEKNIKEFLQSFVHIVQMFINTS |
| SEQ ID NO: | IL-15RaSu/ Fc | ITCPPPMSVEHADIWVKSYSLYSRERYICNSGFKRKAGTSSLTE |
| 3195 | | CVLNKATNVAHWTTPSLKCIREPKSCDKTHTCPPCPAPELLGG |
| | | PSVFLFPPKPKDTLMISRTPEVTCVVVDVSHEDPEVKFNWYVD |
| | | GVEVHNAKTKPREEQYNSTYRVVSVLTVLHQDWLNGKEYKC |
| | | KVSNKALPAPIEKTISKAKGQPREPQVYTLPPSRDELTKNQVSL |
| | | TCLVKGFYPSDIAVEWESNGQPENNYKTTPPVLDSDGSFFLYS |
| | | KLTVDKSRWQQGNVFSCSVMHEALHNHYTQKSLSLSPGK |

IL-15 / IL-15Ra sushi domain fusion (CYP0150)

| | | |
|---|---|---|
| SEQ ID NO: | Human IL-15 | NWVNVISDLKKIEDLIQSMHIDATLYTESDVHPSCKVTAMKCF |
| 3196 | | LLELQVISLESGDASIHDTVENLIILANNSLSSNGNVTESGCKEC |
| | | EELEXKNIKEFLQSFVHIVQMFINTS |
| | | Where X is E or K |
| SEQ ID NO: | Human IL- | ITCPPPMSVEHADIWVKSYSLYSRERYICNSGFKRKAGTSSLTE |
| 3197 | 15Ra sushi | CVLNKATNVAHWTTPSLKCIRDPALVHQRPAPP |
| | and hinge | |
| | domains | |

[0952] In yet another embodiment, the ZBTB32 inhibitor, or a pharmaceutically acceptable salt, hydrate, solvate, prodrug, stereoisomer, or tautomer thereof, of the present disclosure are used in combination with one or more agonists of toll like receptors (TLRs, e.g., TLR7, TLR8, TLR9) to treat a disease, e.g., cancer. In some embodiments, a compound of the present disclosure can be used in combination with a TLR7 agonist or a TLR7 agonist conjugate.

[0953] In some embodiments, the TLR7 agonist comprises a compound disclosed in International Application Publication No. WO2011/049677, which is hereby incorporated by reference in its entirety. In some embodiments, the TLR7 agonist comprises 3-(5-amino-2-(4-(2-(3,3-difluoro-3-phosphonopropoxy)ethoxy)-2-methylphenethyl)benzo[f][1,7]naphthyridin-8-yl)propanoic acid. In some embodiments, the TLR7 agonist comprises a compound of formula:

[chemical structure]

[0954] In another embodiment, the ZBTB32 inhibitor, or a pharmaceutically acceptable salt, hydrate, solvate, prodrug, stereoisomer, or tautomer thereof, of the present disclosure are used in combination with one or more angiogenesis inhibitors to treat cancer, e.g., Bevacizumab (Avastin®), axitinib (Inlyta®); Brivanib alaninate (BMS-582664, (S)—((R)-1-(4-(4-Fluoro-2-methyl-1H-indol-5-yloxy)-5-methylpyrrolo[2,1-f][1,2,4]triazin-6-yloxy)propan-2-yl)₂-aminopropanoate); Sorafenib (Nexavar®); Pazopanib (Votrient®); Sunitinib malate (Sutent®); Cediranib (AZD2171, CAS 288383-20-1); Vargatef (BIBF1120, CAS 928326-83-4); Foretinib (GSK1363089); Telatinib (BAY57-9352, CAS 332012-40-5); Apatinib (YN968D1, CAS 811803-05-1); Imatinib (Gleevec®); Ponatinib (AP24534, CAS 943319-70-8); Tivozanib (AV951, CAS 475108-18-0); Regorafenib (BAY73-4506, CAS 755037-03-7); Vatalanib dihydrochloride (PTK787, CAS 212141-51-0); Brivanib (BMS-540215, CAS 649735-46-6); Vandetanib (Caprelsa® or AZD6474); Motesanib diphosphate (AMG706, CAS 857876-30-3, N-(2,3-dihydro-3,3-dimethyl-1H-indol-6-yl)-2-[(4-pyridinylmethyl)amino]-3-pyridinecarboxamide, described in PCT Publication No. WO 02/066470); Dovitinib dilactic acid (TKI258, CAS 852433-84-2); Linfanib (ABT869, CAS 796967-16-3); Cabozantinib (XL184, CAS 849217-68-1); Lestaurtinib (CAS 111358-88-4); N-[5-[[[5-(1,1-Dimethylethyl)-2-oxazolyl]methyl]thio]-2-thiazolyl]-4-piperidinecarboxamide (BMS38703, CAS 345627-80-7); (3R,4R)-4-Amino-1-((4-((3-methoxyphenyl)amino)pyrrolo[2,1-f][1,2,4]triazin-5-yl)methyl)piperidin-3-ol (BMS690514); N-(3,4-Dichloro-2-fluorophenyl)-6-methoxy-7-[[(3aa,5p,6aa)-octahydro-2-methylcyclopenta[c]pyrrol-5-yl]methoxy]-4-quinazolinamine (XL647, CAS 781613-23-8); 4-Methyl-3-[[1-methyl-6-(3-pyridinyl)-1H-pyrazolo[3,4-d]pyrimidin-4-yl]amino]-N-[3-(trifluoromethyl)phenyl]-benzamide (BHG712, CAS 940310-85-0); or Aflibercept (Eylea®).

[0955] In another embodiment, the ZBTB32 inhibitor, or a pharmaceutically acceptable salt, hydrate, solvate, prodrug, stereoisomer, or tautomer thereof, of the present disclosure are used in combination with one or more heat shock protein inhibitors to treat cancer, e.g., Tanespimycin (17-allylamino-17-demethoxygeldanamycin, also known as KOS-953 and 17-AAG, available from SIGMA, and described in U.S. Pat. No. 4,261,989); Retaspimycin (IPI504), Ganetespib (STA-9090); [6-Chloro-9-(4-methoxy-3,5-dimethylpyridin-2-ylmethyl)-9H-purin-2-yl]amine (BIIB021 or —CNF2024, CAS 848695-25-0); trans-4-[[2-(Aminocarbonyl)-5-[4,5,6,7-tetrahydro-6,6-dimethyl-4-oxo-3-(trifluoromethyl)-1H-indazol-1-yl]phenyl]amino]cyclohexyl glycine ester (SNX5422 or PF04929113, CAS 908115-27-5); 5-[2,4-Dihydroxy-5-(1-methylethyl)phenyl]-N-ethyl-4-[4-(4-morpholinylmethyl)phenyl]-3-Isoxazolecarboxamide (AUY922, CAS 747412-49-3); or 17-Dimethylaminoethylamino-17-demethoxygeldanamycin (17-DMAG).

[0956] In yet another embodiment, the ZBTB32 inhibitor, or a pharmaceutically acceptable salt, hydrate, solvate, prodrug, stereoisomer, or tautomer thereof, of the present disclosure are used in combination with one or more HDAC inhibitors or other epigenetic modifiers. Exemplary HDAC inhibitors include, but not limited to, Voninostat (Zolinza®); Romidepsin (Istodax®); Treichostatin A (TSA); Oxamflatin; Vorinostat (Zolinza®, Suberoylanilide hydroxamic acid); Pyroxamide (syberoyl-3-aminopyridineamide hydroxamic acid); Trapoxin A (RF-1023A); Trapoxin B (RF-10238); Cyclo[(αS,2S)-α-amino-η-oxo-2-oxiraneoctanoyl-O-methyl-D-tyrosyl-L-isoleucyl-L-prolyl] (Cyl-1); Cyclo[(αS,2S)-α-amino-η-oxo-2-oxiraneoctanoyl-O-methyl-D-tyrosyl-L-isoleucyl-(2S)-2-piperidinecarbonyl] (Cyl-2); Cyclic[L-alanyl-D-alanyl-(2S)-η-oxo-L-α-aminooxiraneoctanoyl-D-prolyl] (HC-toxin); Cyclo[(αS,2S)-α-amino-η-oxo-2-oxiraneoctanoyl-D-phenylalanyl-L-leucyl-(2S)-2-piperidinecarbonyl] (WF-3161); Chlamydocin ((S)-Cyclic(2-methylalanyl-L-phenylalanyl-D-prolyl-α-oxo-L-α-aminooxiraneoctanoyl); Apicidin (Cyclo(8-oxo-L-2-aminodecanoyl-1-methoxy-L-tryptophyl-L-isoleucyl-D-2-piperidinecarbonyl); Romidepsin (Istodax®, FR-901228); 4-Phenylbutyrate; Spiruchostatin A; Mylproin (Valproic acid); Entinostat (MS-275, N-(2-Aminophenyl)-4-[N-(pyridine-3-yl-methoxycarbonyl)-amino-methyl]-benzamide); Depudecin (4,5:8,9-dianhydro-1,2,6,7,11-pentadeoxy-D-threo-D-ido-Undeca-1,6-dienitol); 4-(Acetylamino)-N-(2-aminophenyl)-benzamide (also known as CI-994); N1-(2-Aminophenyl)-N8-phenyl-octanediamide (also known as BML-210); 4-(Dimethylamino)-N-(7-(hydroxyamino)-7-oxoheptyl)benzamide (also known as M344); (E)-3-(4-(((2-(1H-indol-3-yl)ethyl)(2-hydroxyethyl)amino)-methyl)phenyl)-N-hydroxyacrylamide; Panobinostat(Farydak®); Mocetinostat, and Belinostat (also known as PXD101, Beleodaq®, or (2E)-N-Hydroxy-3-[3-(phenylsulfamoyl)phenyl]prop-2-enamide), or chidamide (also known as CS055 or HBI-8000, (E)-N-(2-amino-5-fluorophenyl)-4-((3-(pyridin-3-yl)acrylamido)methyl)benzamide). Other epigenetic modifiers include but not limited to inhibitors of EZH2 (enhancer of zeste homolog 2), EED (embryonic ectoderm development), or LSD1 (lysine-specific histone demethylase 1A or KDM1A).

[0957] In yet another embodiment, the ZBTB32 inhibitor, or a pharmaceutically acceptable salt, hydrate, solvate, prodrug, stereoisomer, or tautomer thereof, of the present disclosure are used in combination with one or more inhibitors of indoleamine-pyrrole 2,3-dioxygenase (IDO), for example, Indoximod (also known as NLG-8189), α-Cyclohexyl-5H-imidazo[5,1-a]isoindole-5-ethanol (also known as NLG919), or (4E)-4-[(3-Chloro-4-fluoroanilino)-nitrosomethylidene]-1,2,5-oxadiazol-3-amine (also known as INCB024360), to treat cancer.

### Chimeric Antigen Receptors

[0958] The present disclosure provides for the ZBTB32 inhibitor, or a pharmaceutically acceptable salt, hydrate, solvate, prodrug, stereoisomer, or tautomer thereof for use in combination with adoptive immunotherapy methods and reagents such as chimeric antigen receptor (CAR) immune effector cells, e.g., T cells, or chimeric TCR-transduced immune effector cells, e.g., T cells, as described herein.

### Estrogen Receptor Antagonists

[0959] In some embodiments, an estrogen receptor (ER) antagonist is used in combination with the ZBTB32 inhibitor, or a pharmaceutically acceptable salt, hydrate, solvate, prodrug, stereoisomer, or tautomer thereof, for treating a disease, e.g., cancer. In some embodiments, the estrogen receptor antagonist is a selective estrogen receptor degrader (SERD). SERDs are estrogen receptor antagonists which bind to the receptor and result in e.g., degradation or down-regulation of the receptor (Boer K. et al., (2017) Therapeutic Advances in Medical Oncology 9(7): 465-479). ER is a hormone-activated transcription factor important for e.g., the growth, development and physiology of the human reproductive system. ER is activated by, e.g., the hormone estrogen (17beta estradiol). ER expression and signalling is implicated in cancers (e.g., breast cancer), e.g., ER positive (ER+) breast cancer. In some embodiments, the SERD is chosen from LSZ102, fulvestrant, brilanestrant, or elacestrant.

[0960] Exemplary Estrogen Receptor Antagonists

[0961] In some embodiments, the SERD comprises a compound disclosed in International Application Publication No. WO 2014/130310, which is hereby incorporated by reference in its entirety. In some embodiments, the SERD comprises LSZ102. LSZ102 has the chemical name: (E)-3-(4-((2-(2-(1,1-difluoroethyl)-4-fluorophenyl)-6-hydroxybenzo[b]thiophen-3-yl)oxy)phenyl)acrylic acid.

[0962] Other Exemplar Estrogen Receptor Antagonists

[0963] In some embodiments, the SERD comprises fulvestrant (CAS Registry Number: 129453-61-8), or a compound disclosed in International Application Publication No. WO 2001/051056, which is hereby incorporated by reference in its entirety. Fulvestrant is also known as ICI 182780, ZM 182780, FASLODEX®, or (7α,17β)-7-{9-[(4,4,5,5,5-pentafluoropentyl)sulfinyl]nonyl}estra-1,3,5(10)-triene-3,17-diol. Fulvestrant is a high affinity estrogen receptor antagonist with an IC50 of 0.29 nM.

[0964] In some embodiments, the SERD comprises elacestrant (CAS Registry Number: 722533-56-4), or a compound disclosed in U.S. Pat. No. 7,612,114, which is incorporated by reference in its entirety. Elacestrant is also known as RAD1901, ER-306323 or (6R)-6-{2-[Ethyl({4-[2-(ethylamino)ethyl]phenyl}methyl)amino]-4-methoxyphenyl}-5,6,7,8-tetrahydronaphthalen-2-ol. Elacestrant is an orally bioavailable, non-steroidal combined selective estrogens receptor modulator (SERM) and a SERD. Elacestrant is also disclosed, e.g., in Garner F et al., (2015) Anticancer Drugs 26(9):948-56.

[0965] In some embodiments, the SERD is brilanestrant (CAS Registry Number: 1365888-06-7), or a compound disclosed in International Application Publication No. WO 2015/136017, which is incorporated by reference in its entirety. Brilanestrant is also known as GDC-0810, ARN810, RG-6046, RO-7056118 or (2E)-3-{4-[(1E)-2-(2-chloro-4-fluorophenyl)-1-(1H-indazol-5-yl)but-1-en-1-yl]phenyl}prop-2-enoic acid. Brilanestrant is a next-generation, orally bioavailable selective SERD with an IC50 of 0.7 nM. Brilanestrant is also disclosed, e.g., in Lai A. et al. (2015) Journal of Medicinal Chemistry 58 (12): 4888-4904.

[0966] In some embodiments, the SERD is chosen from RU 58668, GW7604, AZD9496, bazedoxifene, pipendoxifene, arzoxifene, OP-1074, or acolbifene, e.g., as disclosed in McDonell et al. (2015) Journal of Medicinal Chemistry 58(12) 4883-4887. Other exemplary estrogen receptor antagonists are disclosed, e.g., in WO 2011/156518, WO 2011/159769, WO 2012/037410, WO 2012/037411, and US 2012/0071535, all of which are hereby incorporated by reference in their entirety.

### CDK4/6 Inhibitors

[0967] In some embodiments, an inhibitor of Cyclin-Dependent Kinases 4 or 6 (CDK4/6) is used in combination with the ZBTB32 inhibitor, or a pharmaceutically acceptable salt, hydrate, solvate, prodrug, stereoisomer, or tautomer thereof, for treating a disease, e.g., cancer. In some embodiments, the CDK4/6 inhibitor is chosen from ribociclib, abemaciclib (Eli Lilly), or palbociclib.

### Exemplary CDK4/6 Inhibitors

[0968] In some embodiments, the CDK4/6 inhibitor comprises ribociclib (CAS Registry Number: 1211441-98-3), or a compound disclosed in U.S. Pat. Nos. 8,415,355 and 8,685,980, which are incorporated by reference in their entirety.

[0969] In some embodiments, the CDK4/6 inhibitor comprises a compound disclosed in International Application Publication No. WO 2010/020675 and U.S. Pat. Nos. 8,415,355 and 8,685,980, which are incorporated by reference in their entirety.

[0970] In some embodiments, the CDK4/6 inhibitor comprises ribociclib (CAS Registry Number: 1211441-98-3). Ribociclib is also known as LEE011, KISQALI®, or 7-cyclopentyl-N,N-dimethyl-2-((5-(piperazin-1-yl)pyridin-2-yl)amino)-7H-pyrrolo[2,3-d]pyrimidine-6-carboxamide.

[0971] Other Exemplary CDK4/6 Inhibitors

[0972] In some embodiments, the CDK4/6 inhibitor comprises abemaciclib (CAS Registry Number: 1231929-97-7). Abemaciclib is also known as LY835219 or N-[5-[(4-Ethyl-1-piperazinyl)methyl]-2-pyridinyl]-5-fluoro-4-[4-fluoro-2-methyl-1-(1-methylethyl)-1H-benzimidazol-6-yl]-2-pyrimidinamine. Abemaciclib is a CDK inhibitor selective for CDK4 and CDK6 and is disclosed, e.g., in Torres-Guzman R et al. (2017) Oncotarget 10.18632/oncotarget.17778.

[0973] In some embodiments, the CDK4/6 inhibitor comprises palbociclib (CAS Registry Number: 571190-30-2). Palbociclib is also known as PD-0332991, IBRANCE® or 6-Acetyl-8-cyclopentyl-5-methyl-2-{[5-(1-piperazinyl)-2-pyridinyl]amino}pyrido[2,3-d]pyrimidin-7(8H)-one. Palbociclib inhibits CDK4 with an IC50 of 11 nM, and inhibits CDK6 with an IC50 of 16 nM, and is disclosed, e.g., in Finn et al. (2009) Breast Cancer Research 11(5):R77.

### CXCR2 Inhibitors

[0974] In some embodiments, an inhibitor of chemokine (C—X—C motif) receptor 2 (CXCR2) is used in combination with the ZBTB32 inhibitor, or a pharmaceutically acceptable salt, hydrate, solvate, prodrug, stereoisomer, or tautomer thereof, for treating a disease, e.g., cancer. In some embodiments, the CXCR2 inhibitor is chosen from 6-chloro-3-((3,4-dioxo-2-(pentan-3-ylamino)cyclobut-1-en-1-yl)amino)-2-hydroxy-N-methoxy-N-methylbenzenesulfonamide, danirixin, reparixin, or navarixin.

### Exemplary CXCR2 Inhibitors

[0975] In some embodiments, the CXCR2 inhibitor comprises a compound disclosed in U.S. Pat. Nos. 7,989,497, 8,288,588, 8,329,754, 8,722,925, 9,115,087, U.S. Application Publication Nos. US 2010/0152205, US 2011/0251205 and US 2011/0251206, and International Application Publication Nos. WO 2008/061740, WO 2008/061741, WO 2008/062026, WO 2009/106539, WO2010/063802, WO 2012/062713, WO 2013/168108, WO 2010/015613 and WO 2013/030803. In some embodiments, the CXCR2 inhibitor comprises 6-chloro-3-((3,4-dioxo-2-(pentan-3-ylamino)cyclobut-1-en-1-yl)amino)-2-hydroxy-N-methoxy-N-methylbenzenesulfonamide or a choline salt thereof. In some embodiments, the CXCR2 inhibitor comprises 6-chloro-3-((3,4-dioxo-2-(pentan-3-ylamino)cyclobut-1-en-1-yl)amino)-2-hydroxy-N-methoxy-N-methylbenzenesulfonamide choline salt. In some embodiments, the CXCR2 inhibitor is 2-Hydroxy-N,N,N-trimethylethan-1-aminium 3-chloro-6-({3,4-dioxo-2-[(pentan-3-yl)amino]cyclobut-1-en-1-yl}amino)-2-(N-methoxy-N-methylsulfamoyl)phenolate (i.e., 6-chloro-3-((3,4-dioxo-2-(pentan-3-ylamino)cyclobut-1-en-1-yl)amino)-2-hydroxy-N-methoxy-N-methylbenzenesulfonamide choline salt) and has the following chemical structure:

[chemical structure]

### Other Exemplary CXCR2 Inhibitors

[0976] In some embodiments, the CXCR2 inhibitor comprises danirixin (CAS Registry Number: 954126-98-8). Danirixin is also known as GSK1325756 or 1-(4-chloro-2-hydroxy-3-piperidin-3-ylsulfonylphenyl)-3-(3-fluoro-2-methylphenyl)urea. Danirixin is disclosed, e.g., in Miller et al. Eur J Drug Metab Pharmacokinet (2014) 39:173-181; and Miller et al. BMC Pharmacology and Toxicology (2015), 16:18.

[0977] In some embodiments, the CXCR2 inhibitor comprises reparixin (CAS Registry Number: 266359-83-5). Reparixin is also known as repertaxin or (2R)-2-[4-(2-methylpropyl)phenyl]-N-methylsulfonylpropanamide. Reparixin is anon-competitive allosteric inhibitor of CXCR1/2. Reparixin is disclosed, e.g., in Zarbock et al. Br J Pharmacol. 2008; 155(3):357-64.

[0978] In some embodiments, the CXCR2 inhibitor comprises navarixin. Navarixin is also known as MK-7123, SCH 527123, PS291822, or 2-hydroxy-N,N-dimethyl-3-[[2-[[(1R)-1-(5-methylfuran-2-yl)propyl]amino]-3,4-dioxocyclobuten-1-yl]amino]benzamide. Navarixin is disclosed, e.g., in Ning et al. Mol Cancer Ther. 2012; 11(6):1353-64.

### CSF-1/1R Binding Agents

[0979] In some embodiments, a CSF-1/1R binding agent is used in combination with the ZBTB32 inhibitor, or a pharmaceutically acceptable salt, hydrate, solvate, prodrug, stereoisomer, or tautomer thereof, for treating a disease, e.g., cancer. In some embodiments, the CSF-1/1R binding agent is chosen from an inhibitor of macrophage colony-stimulating factor (M-CSF), e.g., a monoclonal antibody or Fab to M-CSF (e.g., MCS110), a CSF-1R tyrosine kinase inhibitor (e.g., 4-((2-(((1R,2R)-2-hydroxycyclohexyl)amino)benzo[d]thiazol-6-yl)oxy)-N-methylpicolinamide or BLZ945), a receptor tyrosine kinase inhibitor (RTK) (e.g., pexidartinib), or an antibody targeting CSF-1R (e.g., emactuzumab or FPA008). In some embodiments, the CSF-1/1R inhibitor is BLZ945. In some embodiments, the CSF-1/1R binding agent is MCS110. In other embodiments, the CSF-1/1R binding agent is pexidartinib.

### Exemplary CSF-1 Binding Agents

[0980] In some embodiments, the CSF-1/1R binding agent comprises an inhibitor of macrophage colony-stimulating factor (M-CSF). M-CSF is also sometimes known as CSF-1. In certain embodiments, the CSF-1/1R binding agent is an antibody to CSF-1 (e.g., MCS110). In other embodiments, the CSF-1/1R binding agent is an inhibitor of CSF-1R (e.g., BLZ945).

[0981] In some embodiments, the CSF-1/1R binding agent comprises a monoclonal antibody or Fab to M-CSF (e.g., MCS110/H—RX1), or a binding agent to CSF-1 disclosed in International Application Publication Nos. WO 2004/045532 and WO 2005/068503, including H—RX1 or 5H4 (e.g., an antibody molecule or Fab fragment against M-CSF) and U.S. Pat. No. 9,079,956, which applications and patent are incorporated by reference in their entirety.

TABLE 24
Amino acid and nucleotide sequences of an exemplary anti-M-CSF antibody molecule
(MCS110)

| | |
|---|---|
| (H-RX1) HC | QVQLQESGPGLVKPSQTLSLTCTVSDYSITSDYAWNWIRQFPGKGLEWMG |
| | YISYSGSTSYNPSLKSRITISRDTSKNQFSLQLNSVTAADTAVYYCASFDYA |
| | HAMDYWGQGTTVTVSSASTKGPSVFPLAPSSKSTSGGTAALGCLVKDYFP |
| | EPVTVSWNSGALTSGVHTFPAVLQSSGLYSLSSVVTVPSSSLGTQTYICNVN |
| | HKPSNTKVDKRVEPKSCDKTHTCPPCPAPELLGGPSVFLFPPKPKDTLMISR |
| | TPEVTCVVVDVSHEDPEVKFNWYVDGVEVHNAKTKPREEQYNSTYRVVS |
| | VLTVLHQDWLNGKEYKCKVSNKALPAPIEKTISKAKGQPREPQVYTLPPSR |
| | EEMTKNQVSLTCLVKGFYPSDIAVEWESNGQPENNYKTTPPVLDSDGSFFL |
| | YSKLTVDKSRWQQGNVFSCSVMHEALHNHYTQKSLSLSPGK (SEQ ID NO: |
| | 271) |
| (H-RX1) LC | DIVLTQSPAFLSVTPGEKVTFTCQASQSIGTSIHWYQQKTDQAPKLLIKYAS |
| | ESISGIPSRFSGSGSGTDFTLTISSVEAEDAADYYCQQINSWPTTFGGGTKLEI |
| | KRTVAAPSVFIFPPSDEQLKSGTASVVCLLNNFYPREAKVQWKVDNALQS |
| | GNSQESVTEQDSKDSTYSLSSTLTLSKADYEKHKVYACEVTHQGLSSPVTK |
| | SFNRGEC (SEQ ID NO: 272) |
| Heavy Chain | SDYAWN (SEQ ID NO: 273) |
| CDR1 (Kabat) | |
| Heavy Chain | YISYSGSTSYNPSLKS (SEQ ID NO: 274) |
| CDR2 (Kabat) | |
| Heavy Chain | FDYAHAMDY (SEQ ID NO: 275) |
| CDR3 (Kabat) | |
| Light Chain | QASQSIGTSIH (SEQ ID NO: 276) |
| CDR1 (Kabat) | |
| Light Chain | YASESIS (SEQ ID NO: 277) |
| CDR2 (Kabat) | |
| Light Chain | QQINSWPTT (SEQ ID NO: 278) |
| CDR3 (Kabat) | |

[0982] In another embodiment, the CSF-1/1R binding agent comprises a CSF-1R tyrosine kinase inhibitor, 4-((2-(((1R,2R)-2-hydroxycyclohexyl)amino)benzo[d]thiazol-6-yl)oxy)-N-methyl picolinamide (BLZ945), or a compound disclosed in International Application Publication No. WO 2007/121484, and U.S. Pat. Nos. 7,553,854, 8,173,689, and 8,710,048, which are incorporated by reference in their entirety.

### Other Exemplary CSF-1/1R Binding Agents

[0983] In some embodiments, the CSF-1/1R binding agent comprises pexidartinib (CAS Registry Number 1029044-16-3). Pexidrtinib is also known as PLX3397 or 5-((5-chloro-1H-pyrrolo[2,3-b]pyridin-3-yl)methyl)-N-((6-(trifluoromethyl)pyridin-3-yl)methyl)pyridin-2-amine. Pexidartinib is a small-molecule receptor tyrosine kinase (RTK) inhibitor of KIT, CSF1R and FLT3. FLT3, CSF1R and FLT3 are overexpressed or mutated in many cancer cell types and play major roles in tumor cell proliferation and metastasis. PLX3397 can bind to and inhibit phosphorylation of stem cell factor receptor (KIT), colony-stimulating factor-1 receptor (CSF1R) and FMS-like tyrosine kinase 3 (FLT3), which may result in the inhibition of tumor cell proliferation and down-modulation of macrophages, osteoclasts and mast cells involved in the osteolytic metastatic disease.

[0984] In some embodiments, the CSF-1/1R binding agent is emactuzumab. Emactuzumab is also known as RG7155 or R05509554. Emactuzumab is a humanized IgG1 mAb targeting CSF1R. In some embodiments, the CSF-1/1R binding agent is FPA008. FPA008 is a humanized mAb that inhibits CSF1R.

### A2aR Antagonists

[0985] In some embodiments, an adenosine A2a receptor (A2aR) antagonist (e.g., an inhibitor of A2aR pathway, e.g., an adenosine inhibitor, e.g., an inhibitor of A2aR or CD-73) is used in combination with the ZBTB32 inhibitor, or a pharmaceutically acceptable salt, hydrate, solvate, prodrug, stereoisomer, or tautomer thereof, for treating a disease, e.g., cancer. In some embodiments, the A2aR antagonist is selected from PBF509 (NIR178) (Palobiofarma/Novartis), CP1444/V81444 (Corvus/Genentech), AZD4635/HTL-1071 (AstraZeneca/Heptares), Vipadenant (Redox/Juno), GBV-2034 (Globavir), AB928 (Arcus Biosciences), Theophylline, Istradefylline (Kyowa Hakko Kogyo), Tozadenant/SYN-115 (Acorda), KW-6356 (Kyowa Hakko Kogyo), ST-4206 (Leadiant Biosciences), and Preladenant/SCH 420814 (Merck/Schering).

Exemplary A2aR antagonists

[0986] In some embodiments, the A2aR antagonist comprises PBF509 (NIR178) or a compound disclosed in U.S. Pat. No. 8,796,284 or in International Application Publication No. WO 2017/025918, herein incorporated by reference in their entirety. PBF509 (NIR178) is also known as NIR178.

### Other Exemplary A2aR Antagonists

[0987] In certain embodiments, the A2aR antagonist comprises CPI444/V81444. CPI-444 and other A2aR antagonists are disclosed in International Application Publication No. WO 2009/156737, herein incorporated by reference in its entirety. In certain embodiments, the A2aR antagonist is (S)-7-(5-methylfuran-2-yl)-3-((6-(((tetrahydrofuran-3-yl)oxy)methyl)pyridin-2-yl)methyl)-3H-[1,2,3]triazolo[4,5-d]pyrimidin-5-amine. In certain embodiments, the A2aR antagonist is (R)-7-(5-methylfuran-2-yl)-3-((6-(((tetrahydrofuran-3-yl)oxy)methyl)pyridin-2-yl)methyl)-3H-[1,2,3]triazolo[4,5-d]pyrimidin-5-amine, or racemate thereof. In certain embodiments, the A2aR antagonist is 7-(5-methylfuran-2-yl)-3-((6-(((tetrahydrofuran-3-yl)oxy)methyl)pyridin-2-yl)methyl)-3H-[1,2,3]triazolo[4,5-d]pyrimidin-5-amine.

[0988] In certain embodiments, the A2aR antagonist is AZD4635/HTL-1071. A2aR antagonists are disclosed in International Application Publication No. WO 2011/095625, herein incorporated by reference in its entirety. In certain embodiments, the A2aR antagonist is 6-(2-chloro-6-methylpyridin-4-yl)-5-(4-fluorophenyl)-1,2,4-triazin-3-amine.

[0989] In certain embodiments, the A2aR antagonist is ST-4206 (Leadiant Biosciences). In certain embodiments, the A2aR antagonist is an A2aR antagonist described in U.S. Pat. No. 9,133,197, herein incorporated by reference in its entirety.

[0990] In certain embodiments, the A2aR antagonist is an A2aR antagonist described in U.S. Pat. Nos. 8,114,845 and 9,029,393, U.S. Application Publication Nos. 2017/0015758 and 2016/0129108, herein incorporated by reference in their entirety.

[0991] In some embodiments, the A2aR antagonist is istradefylline (CAS Registry Number: 155270-99-8). Istradefylline is also known as KW-6002 or 8-[(E)-2-(3,4-dimethoxyphenyl)vinyl]-1,3-diethyl-7-methyl-3,7-dihydro-1H-purine-2,6-dione. Istradefylline is disclosed, e.g., in LeWitt et al. (2008) Annals of Neurology 63 (3): 295-302).

[0992] In some embodiments, the A2aR antagonist is tozadenant (Biotie). Tozadenant is also known as SYN115 or 4-hydroxy-N-(4-methoxy-7-morpholin-4-yl-1,3-benzothiazol-2-yl)-4-methylpiperidine-1-carboxamide. Tozadenant blocks the effect of endogenous adenosine at the A2a receptors, resulting in the potentiation of the effect of dopamine at the D2 receptor and inhibition of the effect of glutamate at the mGluR5 receptor. In some embodiments, the A2aR antagonist is preladenant (CAS Registry Number: 377727-87-2). Preladenant is also known as SCH 420814 or 2-(2-Furanyl)-7-[2-[4-[4-(2-methoxyethoxy)phenyl]-1-piperazinyl]ethyl]7H-pyrazolo[4,3-e][1,2,4]triazolo[1,5-c]pyrimidine-5-amine. Preladenant was developed as a drug that acted as a potent and selective antagonist at the adenosine A2A receptor.

[0993] In some embodiments, the A2aR antagonist is vipadenan. Vipadenan is also known as BIIB014, V2006, or 3-[(4-amino-3-methylphenyl)methyl]-7-(furan-2-yl)triazolo[4,5-d]pyrimidin-5-amine. Other exemplary A2aR antagonists include, e.g., ATL-444, MSX-3, SCH-58261, SCH-412,348, SCH-442,416, VER-6623, VER-6947, VER-7835, CGS-15943, and ZM-241,385.

[0994] In some embodiments, the A2aR antagonist is an A2aR pathway antagonist (e.g., a CD-73 inhibitor, e.g., an anti-CD73 antibody) is MEDI9447. MEDI9447 is a monoclonal antibody specific for CD73. Targeting the extracellular production of adenosine by CD73 may reduce the immunosuppressive effects of adenosine. MEDI9447 was reported to have a range of activities, e.g., inhibition of CD73 ectonucleotidase activity, relief from AMP-mediated lymphocyte suppression, and inhibition of syngeneic tumor growth. MEDI9447 can drive changes in both myeloid and lymphoid infiltrating leukocyte populations within the tumor microenvironment. These changes include, e.g., increases in CD8 effector cells and activated macrophages, as well as a reduction in the proportions of myeloid-derived suppressor cells (MDSC) and regulatory T lymphocytes.

### IDO Inhibitors

[0995] In some embodiments, an inhibitor of indoleamine 2,3-dioxygenase (IDO) and/or tryptophan 2,3-dioxygenase (TDO) is used in combination with the ZBTB32 inhibitor, or a pharmaceutically acceptable salt, hydrate, solvate, prodrug, stereoisomer, or tautomer thereof, for treating a disease, e.g., cancer. In some embodiments, the IDO inhibitor is chosen from (4E)-4-[(3-chloro-4-fluoroanilino)-nitrosomethylidene]-1,2,5-oxadiazol-3-amine (also known as epacadostat or INCB24360), indoximod ( ), (1-methyl-D-tryptophan), α-cyclohexyl-5H-Imidazo[5,1-a]isoindole-5-ethanol (also known as NLG919), indoximod, and BMS-986205 (formerly F001287).

### Exemplary IDO Inhibitors

[0996] In some embodiments, the IDO/TDO inhibitor is indoximod (New Link Genetics). Indoximod, the D isomer of 1-methyl-tryptophan, is an orally administered small-molecule indoleamine 2,3-dioxygenase (IDO) pathway inhibitor that disrupts the mechanisms by which tumors evade immune-mediated destruction.

[0997] In some embodiments, the IDO/TDO inhibitor is NLG919 (New Link Genetics). NLG919 is a potent IDO (indoleamine-(2,3)-dioxygenase) pathway inhibitor with Ki/EC50 of 7 nM/75 nM in cell-free assays.

[0998] In some embodiments, the IDO/TDO inhibitor is epacadostat (CAS Registry Number: 1204669-58-8). Epacadostat is also known as INCB24360 or INCB024360 (Incyte). Epacadostat is a potent and selective indoleamine 2,3-dioxygenase (IDO1) inhibitor with IC50 of 10 nM, highly selective over other related enzymes such as IDO2 or tryptophan 2,3-dioxygenase (TDO).

[0999] In some embodiments, the IDO/TDO inhibitor is F001287 (Flexus/BMS). F001287 is a small molecule inhibitor of indoleamine 2,3-dioxygenase 1 (IDO1).

### STING Agonists

[1000] In some embodiments, a STING agonist is used in combination with the ZBTB32 inhibitor, or a pharmaceutically acceptable salt, hydrate, solvate, prodrug, stereoisomer, or tautomer thereof, for treating a disease, e.g., cancer. In some embodiments, the STING agonist is cyclic dinucleotide, e.g., a cyclic dinucleotide comprising purine or pyrimidine nucleobases (e.g., adenosine, guanine, uracil, thymine, or cytosine nucleobases). In some embodiments, the nucleobases of the cyclic dinucleotide comprise the same nucleobase or different nucleobases.

[1001] In some embodiments, the STING agonist comprises an adenosine or a guanosine nucleobase. In some embodiments, the STING agonist comprises one adenosine nucleobase and one guanosine nucleobase. In some embodiments, the STING agonist comprises two adenosine nucleobases or two guanosine nucleobases.

[1002] In some embodiments, the STING agonist comprises a modified cyclic dinucleotide, e.g., comprising a modified nucleobase, a modified ribose, or a modified phosphate linkage. In some embodiments, the modified cyclic dinucleotide comprises a modified phosphate linkage, e.g., a thiophosphate.

[1003] In some embodiments, the STING agonist comprises a cyclic dinucleotide (e.g., a modified cyclic dinucleotide) with 2′,5′ or 3′,5′ phosphate linkages. In some embodiments, the STING agonist comprises a cyclic dinucleotide (e.g., a modified cyclic dinucleotide) with Rp or Sp stereochemistry around the phosphate linkages.

[1004] In some embodiments, the STING agonist is MK-1454 (Merck). MK-1454 is a cyclic dinucleotide Stimulator of Interferon Genes (STING) agonist that activates the STING pathway. Exemplary STING agonist are disclosed, e.g., in PCT Publication No. WO 2017/027645.

### Galectin Inhibitors

[1005] In some embodiments, a Galectin, e.g., Galectin-1 or Galectin-3, inhibitor is used in combination with the ZBTB32 inhibitor, or a pharmaceutically acceptable salt, hydrate, solvate, prodrug, stereoisomer, or tautomer thereof, for treating a disease, e.g., cancer. In some embodiments, the combination comprises a Galectin-1 inhibitor and a Galectin-3 inhibitor. In some embodiments, the combination comprises a bispecific inhibitor (e.g., a bispecific antibody molecule) targeting both Galectin-1 and Galectin-3. In some embodiments, the Galectin inhibitor is chosen from an anti-Galectin antibody molecule, GR-MD-02 (Galectin Therapeutics), Galectin-3C (Mandal Med), Anginex, or OTX-008 (OncoEthix, Merck). Galectins are a family of proteins that bind to beta galactosidase sugars.

[1006] The Galectin family of proteins comprises at least of Galectin-1, Galectin-2, Galectin-3, Galectin-4, Galectin-7, and Galectin-8. Galectins are also referred to as S-type lectins, and are soluble proteins with, e.g., intracellular and extracellular functions.

[1007] Galectin-1 and Galectin-3 are highly expressed in various tumor types. Galectin-1 and Galectin-3 can promote angiogenesis and/or reprogram myeloid cells toward a pro-tumor phenotype, e.g., enhance immunosuppression from myeloid cells. Soluble Galectin-3 can also bind to and/or inactivate infiltrating T cells.

### Exemplary Galectin Inhibitors

[1008] In some embodiments, a Galectin inhibitor is an antibody molecule. In an embodiment, an antibody molecule is a monospecific antibody molecule and binds a single epitope. E.g., a monospecific antibody molecule having a plurality of immunoglobulin variable domain sequences, each of which binds the same epitope. In an embodiment, the Galectin inhibitor is an anti-Galectin, e.g., anti-Galectin-1 or anti-Galectin-3, antibody molecule. In some embodiments, the Galectin inhibitor is an anti-Galectin-1 antibody molecule. In some embodiments, the Galectin inhibitor is an anti-Galectin-3 antibody molecule.

[1009] In an embodiment an antibody molecule is a multispecific antibody molecule, e.g., it comprises a plurality of immunoglobulin variable domains sequences, wherein a first immunoglobulin variable domain sequence of the plurality has binding specificity for a first epitope and a second immunoglobulin variable domain sequence of the plurality has binding specificity for a second epitope. In an embodiment, the first and second epitopes are on the same antigen, e.g., the same protein (or subunit of a multimeric protein). In an embodiment, the first and second epitopes overlap. In an embodiment, the first and second epitopes do not overlap. In an embodiment, the first and second epitopes are on different antigens, e.g., the different proteins (or different subunits of a multimeric protein). In an embodiment, a multispecific antibody molecule comprises a third, fourth or fifth immunoglobulin variable domain. In an embodiment, a multispecific antibody molecule is a bispecific antibody molecule, a trispecific antibody molecule, or tetraspecific antibody molecule.

[1010] In an embodiment, the Galectin inhibitor is a multispecific antibody molecule. In an embodiment, a multispecific antibody molecule is a bispecific antibody molecule. A bispecific antibody has specificity for no more than two antigens. A bispecific antibody molecule is characterized by a first immunoglobulin variable domain sequence which has binding specificity for a first epitope and a second immunoglobulin variable domain sequence that has binding specificity for a second epitope. In an embodiment, the first and second epitopes are on the same antigen, e.g., the same protein (or subunit of a multimeric protein). In an embodiment, the first and second epitopes overlap. In an embodiment, the first and second epitopes do not overlap. In an embodiment, the first and second epitopes are on different antigens, e.g., the different proteins (or different subunits of a multimeric protein). In an embodiment a bispecific antibody molecule comprises a heavy chain variable domain sequence and a light chain variable domain sequence which have binding specificity for a first epitope and a heavy chain variable domain sequence and a light chain variable domain sequence which have binding specificity for a second epitope. In an embodiment, a bispecific antibody molecule comprises a half antibody having binding specificity for a first epitope and a half antibody having binding specificity for a second epitope. In an embodiment, a bispecific antibody molecule comprises a half antibody, or fragment thereof, having binding specificity for a first epitope and a half antibody, or fragment thereof, having binding specificity for a second epitope. In an embodiment, a bispecific antibody molecule comprises a scFv, or fragment thereof, have binding specificity for a first epitope and a scFv, or fragment thereof, have binding specificity for a second epitope. In an embodiment, the Galectin inhibitor is a bispecific antibody molecule. In an embodiment, the first epitope is located on Galectin-1, and the second epitope is located on Galectin-3.

[1011] Protocols for generating bispecific or heterodimeric antibody molecules are known in the art; including but not limited to, for example, the “knob in a hole” approach described in, e.g., U.S. Pat. No. 5,731,168; the electrostatic steering Fc pairing as described in, e.g., WO 09/089004, WO 06/106905 and WO 2010/129304; Strand Exchange Engineered Domains (SEED) heterodimer formation as described in, e.g., WO 07/110205; Fab arm exchange as described in, e.g., WO 08/119353, WO 2011/131746, and WO 2013/060867; double antibody conjugate, e.g., by antibody cross-linking to generate a bi-specific structure using a heterobifunctional reagent having an amine-reactive group and a sulfhydryl reactive group as described in, e.g., U.S. Pat. No. 4,433,059; bispecific antibody determinants generated by recombining half antibodies (heavy-light chain pairs or Fabs) from different antibodies through cycle of reduction and oxidation of disulfide bonds between the two heavy chains, as described in, e.g., U.S. Pat. No. 4,444,878; trifunctional antibodies, e.g., three Fab′ fragments cross-linked through sulfhdryl reactive groups, as described in, e.g., U.S. Pat. No. 5,273,743; biosynthetic binding proteins, e.g., pair of scFvs cross-linked through C-terminal tails preferably through disulfide or amine-reactive chemical cross-linking, as described in, e.g., U.S. Pat. No. 5,534,254; bifunctional antibodies, e.g., Fab fragments with different binding specificities dimerized through leucine zippers (e.g., c-fos and c-jun) that have replaced the constant domain, as described in, e.g., U.S. Pat. No. 5,582,996; bispecific and oligospecific mono- and oligovalent receptors, e.g., VH—CH1 regions of two antibodies (two Fab fragments) linked through a polypeptide spacer between the CH1 region of one antibody and the VH region of the other antibody typically with associated light chains, as described in, e.g., U.S. Pat. No. 5,591,828; bispecific DNA-antibody conjugates, e.g., crosslinking of antibodies or Fab fragments through a double stranded piece of DNA, as described in, e.g., U.S. Pat. No. 5,635,602; bispecific fusion proteins, e.g., an expression construct containing two scFvs with a hydrophilic helical peptide linker between them and a full constant region, as described in, e.g., U.S. Pat. No. 5,637,481; multivalent and multispecific binding proteins, e.g., dimer of polypeptides having first domain with binding region of Ig heavy chain variable region, and second domain with binding region of Ig light chain variable region, generally termed diabodies (higher order structures are also disclosed creating bispecific, trispecific, or tetraspecific molecules, as described in, e.g., U.S. Pat. No. 5,837,242; minibody constructs with linked VL and VH chains further connected with peptide spacers to an antibody hinge region and CH3 region, which can be dimerized to form bispecific/multivalent molecules, as described in, e.g., U.S. Pat. No. 5,837,821; VH and VL domains linked with a short peptide linker (e.g., 5 or 10 amino acids) or no linker at all in either orientation, which can form dimers to form bispecific diabodies; trimers and tetramers, as described in, e.g., U.S. Pat. No. 5,844,094; String of VH domains (or VL domains in family members) connected by peptide linkages with crosslinkable groups at the C-terminus further associated with VL domains to form a series of FVs (or scFvs), as described in, e.g., U.S. Pat. No. 5,864,019; and single chain binding polypeptides with both a VH and a VL domain linked through a peptide linker are combined into multivalent structures through non-covalent or chemical crosslinking to form, e.g., homobivalent, heterobivalent, trivalent, and tetravalent structures using both scFV or diabody type format, as described in, e.g., U.S. Pat. No. 5,869,620. Additional exemplary multispecific and bispecific molecules and methods of making the same are found, for example, in U.S. Pat. Nos. 5,910,573, 5,932,448, 5,959,083, 5,989,830, 6,005,079, 6,239,259, 6,294,353, 6,333,396, 6,476,198, 6,511,663, 6,670,453, 6,743,896, 6,809,185, 6,833,441, 7,129,330, 7,183,076, 7,521,056, 7,527,787, 7,534,866, 7,612,181, US2002/004587A1, US2002/076406A1, US2002/103345A1, US2003/207346A1, US2003/211078A1, US2004/219643A1, US2004/220388A1, US2004/242847A1, US2005/003403A1, US2005/004352A1, US2005/069552A1, US2005/079170A1, US2005/100543A1, US2005/136049A1, US2005/136051A1, US2005/163782A1, US2005/266425A1, US2006/083747A1, US2006/120960A1, US2006/204493A1, US2006/263367A1, US2007/004909A1, US2007/087381A1, US2007/128150A1, US2007/141049A1, US2007/154901A1, US2007/274985A1, US2008/050370A1, US2008/069820A1, US2008/152645A1, US2008/171855A1, US2008/241884A1, US2008/254512A1, US2008/260738A1, US2009/130106A1, US2009/148905A1, US2009/155275A1, US2009/162359A1, US2009/162360A1, US2009/175851A1, US2009/175867A1, US2009/232811A1, US2009/234105A1, US2009/263392A1, US2009/274649A1, EP346087A2, WO00/06605A2, WO02/072635A2, WO04/081051A1, WO06/020258A2, WO2007/044887A2, WO2007/095338A2, WO2007/137760A2, WO2008/119353A1, WO2009/021754A2, WO2009/068630A1, WO91/03493A1, WO93/23537A1, WO94/09131A1, WO94/12625A2, WO95/09917A1, WO96/37621A2, WO99/64460A1. The contents of the above-referenced applications are incorporated herein by reference in their entireties.

[1012] In other embodiments, the anti-Galectin, e.g., anti-Galectin-1 or anti-Galectin-3, antibody molecule (e.g., a monospecific, bispecific, or multispecific antibody molecule) is covalently linked, e.g., fused, to another partner e.g., a protein, e.g., as a fusion molecule for example a fusion protein. In one embodiment, a bispecific antibody molecule has a first binding specificity to a first target (e.g., to Galectin-1), a second binding specificity to a second target (e.g., Galectin-3).

[1013] This disclosure provides an isolated nucleic acid molecule encoding the above antibody molecule, vectors and host cells thereof. The nucleic acid molecule includes but is not limited to RNA, genomic DNA and cDNA.

[1014] In some embodiments, a Galectin inhibitor is a peptide, e.g., protein, which can bind to, and inhibit Galectin, e.g., Galectin-1 or Galectin-3, function. In some embodiments, the Galectin inhibitor is a peptide which can bind to, and inhibit Galectin-3 function. In some embodiments, the Galectin inhibitor is the peptide Galectin-3C. In some embodiments, the Galectin inhibitor is a Galectin-3 inhibitor disclosed in U.S. Pat. No. 6,770,622, which is hereby incorporated by reference in its entirety.

[1015] Galectin-3C is an N-terminal truncated protein of Galectin-3, and functions, e.g., as a competitive inhibitor of Galectin-3. Galectin-3C prevents binding of endogenous Galectin-3 to e.g., laminin on the surface of, e.g., cancer cells, and other beta-galactosidase glycoconjugates in the extracellular matrix (ECM). Galectin-3C and other exemplary Galectin inhibiting peptides are disclosed in U.S. Pat. No. 6,770,622.

[1016] In some embodiments, Galectin-3C comprises the amino acid sequence of SEQ ID NO: 279, or an amino acid substantially identical (e.g., 90, 95 or 99%) identical thereto.

(SEQ ID NO: 279)
GAPAGPLIVPYNLPLPGGVVPRMLITILGTVKPNANRIALDFQRGNDVAF
HFNPRFNENNRRVIVCNTKLDNNWGREERQSVFPFESGKPFKIQVLVEPD
HFKVAVNDAHLLQYNHRVKKLNEISKLGISGDIDITSASYTMI

[1017] In some embodiments, the Galectin inhibitor is a peptide, which can bind to, and inhibit Galectin-1 function. In some embodiments, the Galectin inhibitor is the peptide Anginex: Anginex is an anti-angiongenic peptide that binds Galectin-1 (Salomonsson E, et al., (2011) Journal of Biological Chemistry, 286(16):13801-13804). Binding of Anginex to Galectin-1 can interfere with, e.g., the pro-angiongenic effects of Galectin-1.

[1018] In some embodiments, the Galectin, e.g., Galectin-1 or Galectin-3, inhibitor is a non-peptidic topomimetic molecule. In some embodiments, the non-peptidic topomimetic Galectin inhibitor is OTX-008 (OncoEthix). In some embodiments, the non-peptidic topomimetic is a non-peptidic topomimetic disclosed in U.S. Pat. No. 8,207,228, which is herein incorporated by reference in its entirety. OTX-008, also known as PTX-008 or Calixarene 0118, is a selective allosteric inhibitor of Galectin-1. OTX-008 has the chemical name: N-[2-(dimethylamino)ethyl]-2-{[26,27,28-tris({[2-(dimethylamino)ethyl]carbamoyl}methoxy) pentacyclo[19.3.1.1,7.1,0.15,]octacosa-1(25),3(28),4,6,9(27),1012,15,17,19(26),21,23-dodecaen-25-yl]oxy}acetamide.

[1019] In some embodiments, the Galectin, e.g., Galectin-1 or Galectin-3, inhibitor is a carbohydrate based compound. In some embodiments, the Galectin inhibitor is GR-MD-02 (Galectin Therapeutics). In some embodiments, GR-MD-02 is a Galectin-3 inhibitor. GR-MD-02 is a galactose-pronged polysaccharide also referred to as, e.g., a galactoarabino-rhamnogalaturonate. GR-MD-02 and other galactose-pronged polymers, e.g., galactoarabino-rhamnogalaturonates, are disclosed in U.S. Pat. No. 8,236,780 and U.S. Publication 2014/0086932, the entire contents of which are herein incorporated by reference in their entirety.

### MEK Inhibitors

[1020] In some embodiments, a MEK inhibitor is used in combination with the ZBTB32 inhibitor, or a pharmaceutically acceptable salt, hydrate, solvate, prodrug, stereoisomer, or tautomer thereof, for treating a disease, e.g., cancer. In some embodiments, the MEK inhibitor is chosen from Trametinib, selumetinib, AS703026, BIX 02189, BIX 02188, CI-1040, PD0325901, PD98059, U0126, XL-518, G-38963, or G02443714. In some embodiments, the MEK inhibitor is Trametinib.

[1021] Exemplary MEK Inhibitors

[1022] In some embodiments, the MEK inhibitor is trametinib. Trametinib is also known as JTP-74057, TMT212, N-(3-{3-cyclopropyl-5-[(2-fluoro-4-iodophenyl)amino]-6,8-dimethyl-2,4,7-trioxo-3,4,6,7-tetrahydropyrido[4,3-d]pyrimidin-1(2H)-yl}phenyl)acetamide, or Mekinist (CAS Number 871700-17-3).

### Other Exemplary MEK Inhibitors

[1023] In some embodiments the MEK inhibitor comprises selumetinib which has the chemical name: (5-[(4-bromo-2-chlorophenyl)amino]-4-fluoro-N-(2-hydroxyethoxy)-1-methyl-1H-benzimidazole-6-carboxamide. Selumetinib is also known as AZD6244 or ARRY 142886, e.g., as described in PCT Publication No. WO2003077914.

[1024] In some embodiments, the MEK inhibitor comprises AS703026, BIX 02189 or BIX 02188.

[1025] In some embodiments, the MEK inhibitor comprises 2-[(2-Chloro-4-iodophenyl)amino]-N-(cyclopropylmethoxy)-3,4-difluoro-benzamide (also known as CI-1040 or PD184352), e.g., as described in PCT Publication No. WO2000035436).

[1026] In some embodiments, the MEK inhibitor comprises N-[(2R)-2,3-Dihydroxypropoxy]-3,4-difluoro-2-[(2-fluoro-4-iodophenyl)amino]-benzamide (also known as PD0325901), e.g., as described in PCT Publication No. WO2002006213).

[1027] In some embodiments, the MEK inhibitor comprises 2′-amino-3′-methoxyflavone (also known as PD98059) which is available from Biaffin GmbH & Co., KG, Germany.

[1028] In some embodiments, the MEK inhibitor comprises 2,3-bis[amino[(2-aminophenyl)thio]methylene]-butanedinitrile (also known as U0126), e.g., as described in U.S. Pat. No. 2,779,780).

[1029] In some embodiments, the MEK inhibitor comprises XL-518 (also known as GDC-0973) which has a CAS No. 1029872-29-4 and is available from ACC Corp.

[1030] In some embodiments, the MEK inhibitor comprises G-38963.

[1031] In some embodiments, the MEK inhibitor comprises G02443714 (also known as AS703206)

[1032] Additional examples of MEK inhibitors are disclosed in WO 2013/019906, WO 03/077914, WO 2005/121142, WO 2007/04415, WO 2008/024725 and WO 2009/085983, the contents of which are incorporated herein by reference. Further examples of MEK inhibitors include, but are not limited to, 2,3-Bis[amino[(2-aminophenyl)thio]methylene]-butanedinitrile (also known as U0126 and described in U.S. Pat. No. 2,779,780); (3S,4R,5Z,8S,9S,11E)-14-(Ethylamino)-8,9,16-trihydroxy-3,4-dimethyl-3,4,9, 19-tetrahydro-1H-2-benzoxacyclotetradecine-1,7(8H)-dione] (also known as E6201, described in PCT Publication No. WO2003076424); vemurafenib (PLX-4032, CAS 918504-65-1); (R)-3-(2,3-Dihydroxypropyl)-6-fluoro-5-(2-fluoro-4-iodophenylamino)-8-methylpyrido[2,3-d]pyrimidine-4,7(3H,8H)-dione (TAK-733, CAS 1035555-63-5); pimasertib (AS-703026, CAS 1204531-26-9); 2-(2-Fluoro-4-iodophenylamino)-N-(2-hydroxyethoxy)-1,5-dimethyl-6-oxo-1,6-dihydropyridine-3-carboxamide (AZD 8330); and 3,4-Difluoro-2-[(2-fluoro-4-iodophenyl)amino]-N-(2-hydroxyethoxy)-5-[(3-oxo-[1,2]oxazinan-2-yl)methyl]benzamide (CH 4987655 or Ro 4987655).

c-MET Inhibitors

[1033] In some embodiments, a c-MET inhibitor is used in combination with the ZBTB32 inhibitor, or a pharmaceutically acceptable salt, hydrate, solvate, prodrug, stereoisomer, or tautomer thereof, for treating a disease, e.g., cancer. c-MET, a receptor tyrosine kinase overexpressed or mutated in many tumor cell types, plays key roles in tumor cell proliferation, survival, invasion, metastasis, and tumor angiogenesis. Inhibition of c-MET may induce cell death in tumor cells overexpressing c-MET protein or expressing constitutively activated c-MET protein.

[1034] In some embodiments, the c-MET inhibitor is chosen from capmatinib (INC280), JNJ-3887605, AMG 337, LY2801653, MSC2156119J, crizotinib, tivantinib, or golvatinib.

Exemplary c-MET Inhibitors

[1035] In some embodiments, the c-MET inhibitor comprises capmatinib (INC280), or a compound described in U.S. Pat. Nos. 7,767,675, and 8,461,330, which are incorporated by reference in their entirety.

Other Exemplary c-MET Inhibitors

[1036] In some embodiments, the c-MET inhibitor comprises JNJ-38877605. JNJ-38877605 is an orally available, small molecule inhibitor of c-Met. JNJ-38877605 selectively binds to c-MET, thereby inhibiting c-MET phosphorylation and disrupting c-Met signal transduction pathways. In some embodiments, the c-Met inhibitor is AMG 208. AMG 208 is a selective small-molecule inhibitor of c-MET. AMG 208 inhibits the ligand-dependent and ligand-independent activation of c-MET, inhibiting its tyrosine kinase activity, which may result in cell growth inhibition in tumors that overexpress c-Met.

[1037] In some embodiments, the c-Met inhibitor comprises AMG 337. AMG 337 is an orally bioavailable inhibitor of c-Met. AMG 337 selectively binds to c-MET, thereby disrupting c-MET signal transduction pathways.

[1038] In some embodiments, the c-Met inhibitor comprises LY2801653. LY2801653 is an orally available, small molecule inhibitor of c-Met. LY2801653 selectively binds to c-MET, thereby inhibiting c-MET phosphorylation and disrupting c-Met signal transduction pathways.

[1039] In some embodiments, c-Met inhibitor comprises MSC2156119J. MSC2156119J is an orally bioavailable inhibitor of c-Met. MSC2156119J selectively binds to c-MET, which inhibits c-MET phosphorylation and disrupts c-Met-mediated signal transduction pathways.

[1040] In some embodiments, the c-MET inhibitor is capmatinib. Capmatinib is also known as INCB028060. Capmatinib is an orally bioavailable inhibitor of c-MET. Capmatinib selectively binds to c-Met, thereby inhibiting c-Met phosphorylation and disrupting c-Met signal transduction pathways.

[1041] In some embodiments, the c-MET inhibitor comprises crizotinib. Crizotinib is also known as PF-02341066. Crizotinib is an orally available aminopyridine-based inhibitor of the receptor tyrosine kinase anaplastic lymphoma kinase (ALK) and the c-Met/hepatocyte growth factor receptor (HGFR). Crizotinib, in an ATP-competitive manner, binds to and inhibits ALK kinase and ALK fusion proteins. In addition, crizotinib inhibits c-Met kinase, and disrupts the c-Met signalling pathway. Altogether, this agent inhibits tumor cell growth.

[1042] In some embodiments, the c-MET inhibitor comprises golvatinib. Golvatinib is an orally bioavailable dual kinase inhibitor of c-MET and VEGFR-2 with potential antineoplastic activity. Golvatinib binds to and inhibits the activities of both c-MET and VEGFR-2, which may inhibit tumor cell growth and survival of tumor cells that overexpress these receptor tyrosine kinases.

[1043] In some embodiments, the c-MET inhibitor is tivantinib. Tivantinib is also known as ARQ 197. Tivantinib is an orally bioavailable small molecule inhibitor of c-MET. Tivantinib binds to the c-MET protein and disrupts c-Met signal transduction pathways, which may induce cell death in tumor cells overexpressing c-MET protein or expressing constitutively activated c-Met protein.

### TGF-β Inhibitors

[1044] In some embodiments, a transforming growth factor beta (also known as TGF-β TGFβ, TGFb, or TGF-beta, used interchangeably herein) inhibitor is used in combination with the ZBTB32 inhibitor, or a pharmaceutically acceptable salt, hydrate, solvate, prodrug, stereoisomer, or tautomer thereof, for treating a disease, e.g., cancer. In certain embodiments, a combination described herein comprises a transforming growth factor beta (also known as TGF-β TGFβ, TGFb, or TGF-beta, used interchangeably herein) inhibitor.

[1045] TGF-β belongs to a large family of structurally-related cytokines including, e.g., bone morphogenetic proteins (BMPs), growth and differentiation factors, activins and inhibins. In some embodiments, the TGF-β inhibitors described herein can bind and/or inhibit one or more isoforms of TGF-β (e.g., one, two, or all of TGF-β 1, TGF-β2, or TGF-β3).

[1046] Under normal conditions, TGF-β maintains homeostasis and limits the growth of epithelial, endothelial, neuronal and hematopoietic cell lineages, e.g., through the induction of anti-proliferative and apoptotic responses. Canonical and non-canonical signalling pathways are involved in cellular responses to TGF-β. Activation of the TGF-f/Smad canonical pathway can mediate the anti-proliferative effects of TGF-β. The non-canonical TGF-β pathway can activate additional intra-cellular pathways, e.g., mitogen-activated protein kinases (MAPK), phosphatidylinositol 3 kinase/Protein Kinase B, Rho-like GTPases (Tian et al. Cell Signal. 2011; 23(6):951-62; Blobe et al. N Engl J Med. 2000; 342(18):1350-8), thus modulating epithelial to mesenchymal transition (EMT) and/or cell motility.

[1047] Alterations of TGF-β signalling pathway are associated with human diseases, e.g., cancers, cardio-vascular diseases, fibrosis, reproductive disorders, and wound healing. Without wishing to be bound by theory, it is believed that in some embodiments, the role of TGF-β in cancer is dependent on the disease setting (e.g., tumor stage and genetic alteration) and/or cellular context. For example, in late stages of cancer, TGF-β can modulate a cancer-related process, e.g., by promoting tumor growth (e.g., inducing EMT), blocking anti-tumor immune responses, increasing tumor-associated fibrosis, or enhancing angiogenesis (Wakefield and Hill Nat Rev Cancer. 2013; 13(5):328-41). In certain embodiments, a combination comprising a TGF-β inhibitor described herein is used to treat a cancer in a late stage, a metastatic cancer, or an advanced cancer.

[1048] Preclinical evidence indicates that TGF-β plays an important role in immune regulation (Wojtowicz-Praga Invest New Drugs. 2003; 21(1):21-32; Yang et al. Trends Immunol. 2010; 31(6):220-7). TGF-β can down-regulate the host-immune response via several mechanisms, e.g., shift of the T-helper balance toward Th2 μmmune phenotype; inhibition of anti-tumoral Th1 type response and M1-type macrophages; suppression of cytotoxic CD8+ T lymphocytes (CTL), NK lymphocytes and dendritic cell functions, generation of CD4⁺ CD25⁺ T-regulatory cells; or promotion of M2-type macrophages with pro-tumoral activity mediated by secretion of immunosuppressive cytokines (e.g., IL10 or VEGF), pro-inflammatory cytokines (e.g., IL6, TNFα, or IL1) and generation of reactive oxygen species (ROS) with genotoxic activity (Yang et al. Trends Immunol. 2010; 31(6):220-7; Truty and Urrutia Pancreatology. 2007; 7(5-6):423-35; Achyut et al Gastroenterology. 2011; 141(4):1167-78).

### Exemplary TGF-β Inhibitors

[1049] In some embodiments, the TGF-β inhibitor comprises XOMA 089, or a compound disclosed in International Application Publication No. WO 2012/167143, which is incorporated by reference in its entirety.

[1050] XOMA 089 is also known as XPA.42.089. XOMA 089 is a fully human monoclonal antibody that specifically binds and neutralizes TGF-beta 1 and 2 ligands.

[1051] The heavy chain variable region of XOMA 089 has the amino acid sequence of:

(SEQ ID NO: 284)
QVQLVQSGAEVKKPGSSVKVSCKASGGTFSSYAISWVRQAPGQGLEWMGG
IIPIFGTANYAQKFQGRVTITADESTSTAYMELSSLRSEDTAVYYCARGL
WEVRALPSVYWGQGTLVTVSS (disclosed as SEQ ID NO: 6
in WO 2012/167143).

The light chain variable region of XOMA 089 has the amino acid sequence of:

(SEQ ID NO: 285)
SYELTQPPSVSVAPGQTARITCGANDIGSKSVHWYQQKAGQAPVLVVSED
IIRPSGIPERISGSNSGNTATLTISRVEAGDEADYYCQVWDRDSDQYVFG
TGTKVTVLG (disclosed as SEQ ID NO: 8 in WO
2012/167143).

[1052] XOMA 089 binds with high affinity to the human TGF-β isoforms. Generally, XOMA 089 binds with high affinity to TGF-β1 and TGF-β2, and to a lesser extent to TGF-β3. In Biacore assays, the K_{D} of XOMA 089 on human TGF-β is 14.6 pM for TGF-β1, 67.3 pM for TGF-β2, and 948 pM for TGF-β3. Given the high affinity binding to all three TGF-β isoforms, in certain embodiments, XOMA 089 is expected to bind to TGF-β1, 2 and 3 at a dose of XOMA 089 as described herein. XOMA 089 cross-reacts with rodent and cynomolgus monkey TGF-β and shows functional activity in vitro and in vivo, making rodent and cynomolgus monkey relevant species for toxicology studies.

### Other Exemplary TGF-β Inhibitors

[1053] In some embodiments, the TGF-β inhibitor comprises fresolimumab (CAS Registry Number: 948564-73-6). Fresolimumab is also known as GC1008. Fresolimumab is a human monoclonal antibody that binds to and inhibits TGF-beta isoforms 1, 2 and 3.

[1054] The heavy chain of fresolimumab has the amino acid sequence of

(SEQ ID NO: 280)
QVQLVQSGAEVKKPGSSVKVSCKASGYTFSSNVISWVRQAPGQGLEWMGG
VIPIVDIANYAQRFKGRVTITADESTSTTYMELSSLRSEDTAVYYCASTL
GLVLDAMDYWGQGTLVTVSSASTKGPSVFPLAPCSRSTSESTAALGCLVK
DYFPEPVTVSWNSGALTSGVHTFPAVLQSSGLYSLSSVVTVPSSSLGTKT
YTCNVDHKPSNTKVDKRVESKYGPPCPSCPAPEFLGGPSVFLFPPKPKDT
LMISRTPEVTCVVVDVSQEDPEVQFNWYVDGVEVHNAKTKPREEQFNSTY
RVVSVLTVLHQDWLNGKEYKCKVSNKGLPSSIEKTISKAKGQPREPQVYT
LPPSQEEMTKNQVSLTCLVKGFYPSDIAVEWESNGQPENNYKTTPPVLDS
HDGSFFLYSRLTVDKSRWQEGNVFSCSVMHEALHNYTQKSLSLSLGK.

[1055] The light chain of fresolimumab has the amino acid sequence of:

(SEQ ID NO: 281)
ETVLTQSPGTLSLSPGERATLSCRASQSLGSSYLAWYQQKPGQAPRLLIY
GASSRAPGIPDRFSGSGSGTDFTLTISRLEPEDFAVYYCQQYADSPITFG
QGTRLEIKRTVAAPSVFIFPPSDEQLKSGTASVVCLLNNFYPREAKVQWK
VDNALQSGNSQESVTEQDSKDSTYSLSSTLTLSKADYEKHKVYACEVTHQ
GLSSPVTKSFNRGEC.

[1056] Fresolimumab is disclosed, e.g., in International Application Publication No. WO 2006/086469, and U.S. Pat. Nos. 8,383,780 and 8,591,901, which are incorporated by reference in their entirety.

### IL-1β Inhibitors

[1057] The Interleukin-1 (IL-1) family of cytokines is a group of secreted pleotropic cytokines with a central role in inflammation and immune response. Increases in IL-1 are observed in multiple clinical settings including cancer (Apte et al. (2006) Cancer Metastasis Rev. p. 387-408; Dinarello (2010) Eur. J. Immunol. p. 599-606). The IL-1 family comprises, inter alia, IL-1 beta (IL-1b), and IL-1alpha (IL-1a). IL-1b is elevated in lung, breast and colorectal cancer (Voronov et al. (2014) Front Physiol. p. 114) and is associated with poor prognosis (Apte et al. (2000) Adv. Exp. Med. Biol. p. 277-88). Without wishing to be bound by theory, it is believed that in some embodiments, secreted IL-1b, derived from the tumor microenvironment and by malignant cells, promotes tumor cell proliferation, increases invasiveness and dampens anti-tumor immune response, in part by recruiting inhibitory neutrophils (Apte et al. (2006) Cancer Metastasis Rev. p. 387-408; Miller et al. (2007) J. Immunol. p. 6933-42). Experimental data indicate that inhibition of IL-1b results in a decrease in tumor burden and metastasis (Voronov et al. (2003) Proc. Natl. Acad. Sci. U.S.A. p. 2645-50).

[1058] In some embodiments, an interleukin-1 beta (IL-1β) inhibitor is used in combination with the ZBTB32 inhibitor, or a pharmaceutically acceptable salt, hydrate, solvate, prodrug, stereoisomer, or tautomer thereof, for treating a disease, e.g., cancer. In some embodiments, the IL-1β inhibitor is chosen from canakinumab, gevokizumab, Anakinra, or Rilonacept. In some embodiments, the IL-1β inhibitor is canakinumab.

### Exemplary IL-1β Inhibitors

[1059] In some embodiments, the IL-1β inhibitor is canakinumab. Canakinumab is also known as ACZ885 or ILARIS®. Canakinumab is a human monoclonal IgG1/κ antibody that neutralizes the bioactivity of human IL-1β.

[1060] Canakinumab is disclosed, e.g., in WO 2002/16436, U.S. Pat. No. 7,446,175, and EP 1313769. The heavy chain variable region of canakinumab has the amino acid sequence of:

(SEQ ID NO: 282)
MEFGLSWVFLVALLRGVQCQVQLVESGGGVVQPGRSLRLSCAASGFTFSV
YGMNWVRQAPGKGLEWVAIIWYDGDNQYYADSVKGRFTISRDNSKNTLYL
QMNGLRAEDTAVYYCARDLRTGPFDYWGQGTLVTVSS (disclosed
as SEQ ID NO: 1 in U.S. Pat. No. 7,446,175).

The light chain variable region of canakinumab has the amino acid sequence of:

(SEQ ID NO: 283)
MLPSQLIGFLLLWVPASRGEIVLTQSPDFQSVTPKEKVTITCRASQSIGS
SLHWYQQKPDQSPKLLIKYASQSFSGVPSRFSGSGSGTDFTLTINSLEAE
DAAAYYCHQSSSLPFTFGPGTKVDIK (disclosed as SEQ ID
NO: 2 in U.S. Pat. No. 7,446,175).

[1061] Canakinumab has been used, e.g., for the treatment of Cryopyrin Associated Periodic Syndromes (CAPS), in adults and children, for the treatment of systemic juvenile idiopathic arthritis (SJIA), for the symptomatic treatment of acute gouty arthritis attacks in adults, and for other IL-1 driven inflammatory diseases. Without wishing to be bound by theory, it is believed that in some embodiments, IL-1β inhibitors, e.g., canakinumab, can increase anti-tumor immune response, e.g., by blocking one or more functions of IL-1b including, e.g., recruitment of immunosuppressive neutrophils to the tumor microenvironment, stimulation of tumor angiogenesis, and/or promotion of metastasis (Dinarello (2010) Eur. J Immunol. p. 599-606).

[1062] In some embodiments, the combination described herein includes an IL-1β inhibitor, canakinumab, or a compound disclosed in WO 2002/16436, and an inhibitor of an immune checkpoint molecule, e.g., an inhibitor of PD-1 (e.g., an anti-PD-1 antibody molecule). IL-1 is a secreted pleotropic cytokine with a central role in inflammation and immune response. Increases in IL-1 are observed in multiple clinical settings including cancer (Apte et al. (2006) Cancer Metastasis Rev. p. 387-408; Dinarello (2010) Eur. J. Immunol. p. 599-606). IL-1b is elevated in lung, breast and colorectal cancer (Voronov et al. (2014) Front Physiol. p. 114) and is associated with poor prognosis (Apte et al. (2000) Adv. Exp. Med. Biol. p. 277-88). Without wishing to be bound by theory, it is believed that in some embodiments, secreted IL-1b, derived from the tumor microenvironment and by malignant cells, promotes tumor cell proliferation, increases invasiveness and dampens anti-tumor immune response, in part by recruiting inhibitory neutrophils (Apte et al. (2006) Cancer Metastasis Rev. p. 387-408; Miller et al. (2007) J. Immunol. p. 6933-42). Experimental data indicate that inhibition of IL-1b results in a decrease in tumor burden and metastasis (Voronov et al. (2003) Proc. Natl. Acad. Sci. U.S.A. p. 2645-50). Canakinumab can bind IL-1b and inhibit IL-1-mediated signalling. Accordingly, in certain embodiments, an IL-1β inhibitor, e.g., canakinumab, enhances, or is used to enhance, an immune-mediated anti-tumor effect of an inhibitor of PD-1 (e.g., an anti-PD-1 antibody molecule).

[1063] In some embodiments, the IL-1β inhibitor, canakinumab, or a compound disclosed in WO 2002/16436, and the inhibitor of an immune checkpoint molecule, e.g., an inhibitor of PD-1 (e.g., an anti-PD-1 antibody molecule), each is administered at a dose and/or on a time schedule, that in combination, achieves a desired anti-tumor activity.

MDM2 inhibitors

[1064] In some embodiments, a mouse double minute 2 homolog (MDM2) inhibitor is used in combination with the ZBTB32 inhibitor, or a pharmaceutically acceptable salt, hydrate, solvate, prodrug, stereoisomer, or tautomer thereof, for treating a disease, e.g., cancer. The human homolog of MDM2 is also known as HDM2. In some embodiments, an MDM2 inhibitor described herein is also known as a HDM2 inhibitor. In some embodiments, the MDM2 inhibitor is chosen from HDM201 or CGM097.

[1065] In an embodiment the MDM2 inhibitor comprises (S)-1-(4-chlorophenyl)-7-isopropoxy-6-methoxy-2-(4-(methyl(((1r,4S)-4-(4-methyl-3-oxopiperazin-1-yl)cyclohexyl)methyl)amino)phenyl)-1,2-dihydroisoquinolin-3(4H)-one (also known as CGM097) or a compound disclosed in PCT Publication No. WO 2011/076786 to treat a disorder, e.g., a disorder described herein). In one embodiment, a therapeutic agent disclosed herein is used in combination with CGM097.

[1066] In an embodiment, an MDM2 inhibitor comprises an inhibitor of p53 and/or a p53/Mdm2 interaction. In an embodiment, the MDM2 inhibitor comprises (S)-5-(5-chloro-1-methyl-2-oxo-1,2-dihydropyridin-3-yl)-6-(4-chlorophenyl)-2-(2,4-dimethoxypyrimidin-5-yl)-1-isopropyl-5,6-dihydropyrrolo[3,4-d]imidazol-4(1H)-one (also known as HDM201), or a compound disclosed in PCT Publication No. WO2013/111105 to treat a disorder, e.g., a disorder described herein. In one embodiment, a therapeutic agent disclosed herein is used in combination with HDM201. In some embodiments, HDM201 is administered orally.

[1067] In one embodiment, the combination disclosed herein is suitable for the treatment of cancer in vivo. For example, the combination can be used to inhibit the growth of cancerous tumors. The combination can also be used in combination with one or more of: a standard of care treatment (e.g., for cancers or infectious disorders), a vaccine (e.g., a therapeutic cancer vaccine), a cell therapy, a radiation therapy, surgery, or any other therapeutic agent or modality, to treat a disorder herein. For example, to achieve antigen-specific enhancement of immunity, the combination can be administered together with an antigen of interest.

### Multispecific Binding Molecules

[1068] In some embodiments, the ZBTB32 inhibitor, or a pharmaceutically acceptable salt, hydrate, solvate, prodrug, stereoisomer, or tautomer thereof, is used in combination with a multispecific binding molecule (“MBM”). As used herein, the term “MBM” refers to a binding molecule that recognizes two or more different epitopes. Examples of MBMs include bispecific binding molecules (“BBMs”), which recognize two different epitopes, and trispecific binding molecules (“TBMs”), which recognize three different epitopes. The epitopes can be present on the same target or on different targets.

[1069] The MBMs suitable for use or administration in combination with the ZBTB32 inhibitors of the disclosure thus comprise at least two antigen binding domains (“ABDs”) that bind to different epitopes. The term “antigen-binding domain” or “ABD” as used herein refers to a portion of an MBM that has the ability to bind to an epitope non-covalently, reversibly and specifically.

[1070] Generally, for treatment of cancer, the MBMs useful in combination with the ZBTB32 inhibitors of the disclosure bind to at least one tumor-associated antigen (“TAA”). As used herein, the term “tumor-associated antigen” or “TAA” refers to a molecule (typically a protein, carbohydrate, lipid or some combination thereof) that is expressed on the surface of a cancer cell, either entirely or as a fragment (e.g., MHC/peptide), and which is useful for the preferential targeting of a pharmacological agent to the cancer cell. A TAA is a marker that may be expressed by both normal cells and cancer cells, e.g., a lineage marker, e.g., CD19 on B cells. A TAA may also be a cell surface molecule that is overexpressed in a cancer cell in comparison to a normal cell, for instance, 1-fold overexpression, 2-fold overexpression, 3-fold overexpression or more in comparison to a normal cell. A TAA may be a cell surface molecule that is inappropriately synthesized in the cancer cell, for instance, a molecule that contains deletions, additions or mutations in comparison to the molecule expressed on a normal cell. Certain TAAs may be expressed exclusively on the cell surface of a cancer cell, entirely or as a fragment (e.g., MHC/peptide), and not synthesized or expressed on the surface of a normal cell. Accordingly, the term “TAA” encompasses antigens that are specific to cancer cells, sometimes known in the art as tumor-specific antigens (“TSAs”). Further, as used herein, the term “cancer” refers to a disease characterized by the uncontrolled (and often rapid) growth of aberrant cells. Cancer cells can spread locally or through the bloodstream and lymphatic system to other parts of the body. Examples of various cancers are described herein and include but are not limited to, leukemia, multiple myeloma, asymptomatic myeloma, Hodgkin's lymphoma and non-Hodgkin's lymphoma. In some embodiments, the TAA is expressed on cancerous B cells. The term “cancerous B cell” refers to a B cell that is undergoing or has undergone uncontrolled proliferation.

[1071] Examples of TAAs that can be targeted by the MBMs (e.g., BBMs or TBMs) useful in combination with the ZBTB32 inhibitors of the disclosure include TSHR, CD171, CS-1, CLL-1, GD3, Tn Ag, FLT3, CD38, CD44v6, B7H3, KIT, IL-13Ra2, IL-11Ra, PSCA, PRSS21, VEGFR2, LewisY, CD24, PDGFR-beta, SSEA-4, MUC1, EGFR, EGFRvIII, NCAM, CAIX, LMP2, EphA2, fucosyl GM1, sLe, GM3, TGS5, HMWMAA, o-acetyl-GD2, GD2, folate receptor alpha, folate receptor beta, TEM1/CD248, TEM7R, CLDN6, GPRC5D, CXORF61, CD97, CD179a, ALK, polysialic acid, PLAC1, GloboH, NY-BR-1, UPK2, HAVCR1, ADRB3, PANX3, GPR20, LY6K, OR51E2, TAARP, WT1, ETV6-AML, sperm protein 17, XAGE1, Tie 2, MAD-CT-1, MAD-CT-2, Fos-related antigen 1, p53 mutant, hTERT, sarcoma translocation breakpoints, ML-IAP, ERG (TMPRSS2 ETS fusion gene), NA17, PAX3, Androgen receptor, Cyclin B1, MYCN, RhoC, CYP1B1, BORIS, SART3, PAX5, OY-TES1, LCK, AKAP-4, SSX2, CD79a, CD79b, CD72, LAIR1, FCAR, LILRA2, CD300LF, CLEC12A, BST2, EMR2, LY75, GPC3, FCRL5, IGLL1, CD19, CD20, CD30, ERBB2, ROR1, FLT3, TAAG72, CD22, CD33, GD2, BCMA, gp100Tn, FAP, tyrosinase, EPCAM, CEA, Igf-I receptor, Cadherin17, CD32b, GPNMB, GPR64, HER3, LRP6, LYPD8, NKG2D, SLC34A2, SLC39A6, SLITRK6, TACSTD2, and EphB2.

[1072] In certain aspects, the TAAs are expressed on cancerous blood cells, e.g., cancerous B cells. Examples of TAAs expressed on cancerous B cells include, but are not limited to, CD19, CD20, CD22, CD123, BCMA, CD33, CLL1, CD138 (also known as Syndecan-1, SDC1), CS1, CD38, CD133, FLT3, CD52, TNFRSF13C (TNF Receptor Superfamily Member 13C, also referred to in the art as BAFFR: B-Cell-Activating Factor Receptor), TNFRSF13B (TNF Receptor Superfamily Member 13B, also referred to in the art as TACI: Transmembrane Activator And CAML Interactor), CXCR4 (C—X—C Motif Chemokine Receptor 4), PD-L1 (programmed death-ligand 1), LY9 (lymphocyte antigen 9, also referred to in the art as CD229), CD200, FCGR2B (Fc fragment of IgG receptor lib, also referred to in the art as CD32b), CD21, CD23, CD24, CD40L, CD72, CD79a, and CD79b.

[1073] In addition to binding a TAA, MBMs useful in combination with the ZBTB32 inhibitors of the disclosure can engage the immune system, for example a T cell or an NK cell. Engagement of T cells can be achieved through targeting CD3 or other component(s) of a TCR complex, for example TCR-α, TCR-β, or a TCR-α/β dimer. Exemplary ABDs that recognize CD3 or other components of the TCR complex are described in WO 2020/052692 and WO2019/104075 (for example see Sections 7.8.1, 7.8.2 and 7.8.3 of WO 2020/052692 and Section 6.5 of WO 2019/104075, incorporated by reference herein). The MBMs can further include an ABD that binds to CD2, for example as generally disclosed in WO 2019/104075. In some embodiments, CD2 can be targeted through the use of its ligand CD58 and CD2-binding portions thereof as ABDs, as described in Section 6.6.2 of WO 2019/104075, incorporated by reference herein. Engagement of NK cells can be achieved through targeting CD16, NKp46, NKG2D, NKp30, NKp44, NKp46, or a combination thereof, e.g., a combination of CD16 and NKp46. See, e.g., Hu et al., 2019, Front. Immunol. 10:1205, Gauthier et al., 2019, Cell 177(7):1701-1713.

[1074] In some embodiments, the MBM is a BBM that binds to B cell maturation antigen, or BCMA, and a component of the TCR complex, preferably CD3. In other embodiments, the MBM is a TBM that binds to BCMA, a component of the TCR complex, preferably CD3, as well as either a second TAA or CD2 (e.g., through a CD58-based ABD, e.g., an ABD containing amino acids residues 30-123 of CD58). The expression of BCMA has been linked to a number of cancers, autoimmune disorders, and infectious diseases. Cancers with increased expression of BCMA include some hematological cancers, such as multiple myeloma, Hodgkin's and non-Hodgkin's lymphoma, various leukemias, and glioblastoma. WO 2019/229701 describes a number of MBMs that specifically bind to human BCMA as well as sequences of exemplary BCMA binding sequences that can be included in MBMs that bind to BCMA (see for example the BCMA binding sequences set disclosed in paragraph [0149] and Table 1 of WO 2019/229701, incorporated by reference herein). WO 2019/229701 also describes BBMs that are directed against BCMA and CD3 (see for example Section 7.3.3.1 of PCT WO 2019/229701, incorporated by reference herein).

[1075] In other embodiments, the MBM is a BBM that binds CD19 and a component of the TCR complex, preferably CD3. In other embodiments, the MBM is a TBM that binds to CD19, a component of the TCR complex, preferably CD3, as well as either a second TAA or CD2 (e.g., through a CD58-based ABD, e.g., an ABD containing amino acids residues 30-123 of CD58). A TBM that binds to CD19, CD3 and CD2 (e.g., through a CD58-based ABD, e.g., an ABD containing amino acids residues 30-123 of CD58) can have the general configuration depicted in FIG. 1D of WO2019/104075, for example where X in FIG. 1D is a CD19 ABD, X is a CD3 ABM and Z is a CD2 ABM, and more specifically the configurations shown in FIGS. 12A, 12B and 12C of WO2019/104075, all of which figures and accompanying text are incorporated by reference herein. CD19 is expressed during early pre-B cell development and remains until plasma cell differentiation. CD19 is expressed on both normal B cells and malignant B cells whose abnormal growth can lead to B-cell lymphomas. For example, CD19 is expressed on B-cell lineage malignancies, including, but not limited to non-Hodgkin's lymphoma (B-NHL), chronic lymphocytic leukemia, and acute lymphoblastic leukemia.

[1076] Whilst a large number of MBMs that are being developed for cancer therapy typically include one or more ABDs directed against a TAA and one or more ABDs that are able to facilitate engagement of immune cells, MBMs useful in combination with the ZBTB32 inhibitors of the disclosure need not engage immune cells such as T cells or NK cells. For example, MBMs can be used to inhibit the angiogenesis pathways, for example by targeting VEG-F and another antigen such as Delta-like Ligand 4 (DLL-4), a transmembrane ligand for the Notch receptor or angiopoietin 2 (ANG-2).

[1077] Exemplary types of ABDs include antigen-binding fragments and portions of both immunoglobulin and non-immunoglobulin based scaffolds that retain the ability of binding an antigen non-covalently, reversibly and specifically. Thus, as used herein, the term “antigen-binding domain” encompasses antibody fragments that retain the ability of binding an antigen non-covalently, reversibly and specifically. Examples of binding fragments include, but are not limited to, single-chain Fvs (scFv), a Fab fragment, a monovalent fragment consisting of the VL, VH, CL and CH1 domains; a Fd fragment consisting of the VH and CH1 domains; a Fv fragment consisting of the VL and VH domains of a single arm of an antibody; a dAb fragment which consists of a VH domain; and an isolated complementarity determining region (CDR). Thus, the term “antibody fragment” encompasses both proteolytic fragments of antibodies (e.g., Fab and F(ab)₂ fragments) and engineered proteins comprising one or more portions of an antibody (e.g., an scFv). In addition to immunoglobulin-based ABDs, such Fab-, scFv- and other antibody fragment based ABDs such as those described above), the MBMs of the disclosure can also include non-immunoglobulin-based ABDs, or a combination of immunoglobulin and non-immunoglobulin based ABDs. Immunoglobulin-based ABDs that can be used are described in WO 2019/104075 and WO 2019/229701 (see for example Sections 7.2 and 7.3.1 of WO 2019/229701 and Section 6.2.1 of WO 2019/104075, incorporated by reference herein). Non-immunoglobulin-based ABDs, which include Kunitz domains, Adnexins, Affibodies, DARPins, Avimers, Anticalins, Lipocalins, fibronectins scaffolds, Affimers, and Fynomers, are described in WO 2019/104075 and WO 2019/229701 (see for example Section 7.4 of WO 2019/229701 and Section 6.3 of WO 2019/104075 and FIG. 2 and Table 1 of Hober et al., 2019, Methods 154:143-152, incorporated by reference herein). For MBMs that target CD2, a suitable ABD is CD58 or a fragment thereof, as described in Section 6.6.2 of WO 2019/104075, incorporated by reference herein.

[1078] BBMs comprise at least two ABDs but can also contain more than two ABDs. BBMs that contain only two ABDs and are considered bivalent, and a BBM can have three ABDs (i.e., is trivalent), four ABDs (i.e., is tetravalent), or more, provided that the BBM has at least one ABD that can bind one epitope and at least one ABD that can bind a different epitope. Exemplary bivalent, trivalent, and tetravalent BBM configurations are described in WO 2019/229701 (for example FIG. 1 and Section 7.5 of WO 2019/229701 and Section 7.5 of WO 2019/229701, incorporated by reference herein). Although WO 2019/229701 relates to BCMA binding molecules, which can suitably be used in combination with the ZBTB32 inhibitors of the disclosure, the BBM formats described therein are also applicable to any epitope/antigen pairing, for example any TAA and T cell receptor component pair or a TAA and NK cell activating receptor such as CD16, NKp46, NKG2D, NKp30, NKp44 or NKp46. Similarly, TBMs have at least three ABDs (i.e., a TBM is at least trivalent), but can also contain more than three ABDs. For example, a TBM can have four ABDs (i.e., is tetravalent), five ABDs (i.e., is pentavalent), or six ABDs (i.e., is hexavalent), provided that the TBM has at least one ABD that can bind one epitope, at least one ABD that can bind a second epitope, and at least one ABD that can bind a third epitope. Exemplary trivalent, tetravalent, pentavalent, and hexavalent TBM configurations are described in WO 2019/104075 and WO 2019/195535 (for example FIG. 1 and Section 6.4 of WO 2019/104075 and FIG. 1 and Section 7.4 of WO 2019/195535, incorporated by reference herein). Although WO 2019/104075 relates to TBMs that bind to CD2, CD3 (or another T cell receptor component) and a tumor-associated antigen (TAA) and WO 2019/195535 relates to TBMs that bind to CD3 (or another T cell receptor component) and two TAAs, both of which can suitably be used in combination with the ZBTB32 inhibitors of the disclosure, the TBM formats described therein are also applicable to any combination of three epitopes or antigens. For example, a TBM can target a TAA and two NK cell activating receptors, for example any two of CD16, NKp46, NKG2D, NKp30, NKp44 or NKp46. In a particular embodiment, a TBM useful in combination with the ZBTB32 inhibitors of the disclosure can target a TAA, CD16 and NKp46 (see, e.g., Gauthier et al., 2019, Cell 177(7):1701-1713).

[1079] The ABDs of an MBM (or portions thereof) can be connected to each other, for example, by short peptide linkers or by an Fc domain. Methods of connecting ABDs to form an MBM are described in WO 2019/104075 and WO 2019/229701 (see for example Section 7.3.2 of WO 2019/229701 and Section 6.2.2 of WO 2019/104075, incorporated by reference herein).

[1080] The MBMs can have an Fc region formed by the association of two Fc domains. The Fc domains can be homodimeric or heterodimeric. Exemplary heterodimerization strategies, which include knob-into-hole and polar bridge formats, are described in Table 2 and Section 6.3.1.5 of WO 2019/104075 and subsections thereof, incorporated by reference herein. The Fc region can have altered effector function. The term “effector function” refers to an activity of an antibody molecule that is mediated by binding through a domain of the antibody other than the antigen binding domain, usually mediated by binding of effector molecules. Effector function includes complement-mediated effector function, which is mediated by, for example, binding of the C1 component of the complement to the antibody. Activation of complement is important in the opsonization and lysis of cell pathogens. The activation of complement also stimulates the inflammatory response and may also be involved in autoimmune hypersensitivity. Effector function also includes Fc receptor (FcR)-mediated effector function, which may be triggered upon binding of the constant domain of an antibody to an Fc receptor (FcR). Binding of antibody to Fc receptors on cell surfaces triggers a number of important and diverse biological responses including engulfment and destruction of antibody-coated particles, clearance of immune complexes, lysis of antibody-coated target cells by killer cells (called antibody-dependent cell-mediated cytotoxicity, or ADCC), release of inflammatory mediators, placental transfer and control of immunoglobulin production. An effector function of an antibody may be altered by altering, e.g., enhancing or reducing, the affinity of the antibody for an effector molecule such as an Fc receptor or a complement component. Fc regions with altered effector function are described, for example, in Sections 6.3.1.1 through 6.3.1.5 of WO 2019/104075, incorporated by reference herein, and can include, for example altered binding to one or more Fc receptors such as FcRN, modified disulfide bond architecture, or altered glycosylation patterns as compared to a wild type Fc region.

[1081] Additional MBM formats that can be used in combination with the ZBTB32 inhibitors of the disclosure are disclosed, inter alia, in FIG. 1 of Suurs et al., 2019, Pharmacology & Therapeutics 201:103-119, FIG. 2 of Labrijn et al., 2019, Nat Rev Drug Discov. 18(8):585-608; FIG. 4 of Krishnamurthy and Jimeno, 2018, Pharmacology and Therapeutics 185:122-134; FIG. 3 of Sedykh et al., 2018, Drug Design, Development and Therapy 12:195-208; FIG. 1 of Spiess et al., 2015, Molecular Immunology 67:95-106; FIG. 2 of Brinkmann & Kontermann, 2017, mAbs, 9:2, 182-212; FIG. 3 of Klein et al., 2016, mAbs, 8:6, 1010-1020;' and FIG. 2 of Klein et al., 2019, Methods 154:21-31, all of which figures and accompanying text are incorporated by reference herein.

[1082] A number of MBMs have been developed or are in development for treatment of a variety of cancers and can be used in combination of the ZBTB32 inhibitors of the disclosure. See, for example, Tables 1 and 2 of Labrijn et al., 2019, Nat Rev Drug Discov. 18(8):585-608; Tables 1 and 2 of Krishnamurthy and Jimeno, 2018, Pharmacology and Therapeutics 185:122-134; FIG. 3 of Suurs et al., 2019, Pharmacology & Therapeutics 201:103-119; Table 1 of Weidle et al., 2014, Seminars in Oncology 41:653-660, Table I of Sedykh et al., 2018, Drug Design, Development and Therapy 12:195-208; Table 1 of Spiess et al., 2015, Molecular Immunology 67:95-106; Table 1 of Dahlen et al., 2018, Therapeutic Advances in Vaccines and Immunotherapy 6(1) 3-17; and Table 3 of Brinkmann & Kontermann, 2017, mAbs, 9(2):182-212, all such tables and figures and accompanying text incorporated by reference herein. Exemplary MBMs that can be used in combination with the ZBTB32 inhibitors of the disclosure are set forth in the foregoing tables and figures as well as in [Table 25below.

TABLE 25
Exemplary MBMs

| Name(s) | | | |
|---|---|---|---|
| of MBM | ABDs | Proposed indication(s) | Reference/Clinical Trial No. |
| A-319 | Anti-CD3 × anti-CD19 | Hematologic malignancies (e.g., acute | NCT04056975 |
| | | lymphoblastic leukemia and B-cell acute | |
| | | lymphoblastic leukemia) | |
| A-337 | Anti-CD3 × anti-EpCAM | Solid malignancies (e.g., non-small-cell | ACTRN12617001181392 |
| | | lung cancer) | |
| ABBV-428 | Anti-CD40 × anti-MSLN | Solid malignancies | NCT02955251 |
| AFM11 | Anti-CD3 × anti-CD19 | Relapsed or refractory B-cell non-Hodgkin | Reusch et al., 2015, mAbs |
| | | lymphoma | 7: 584-604 |
| AFM13 | Anti-CD30 × anti-CD16A | Relapsed or refractory Hodgkin lymphoma | Malin et al., 2013, Clin Cancer |
| | | | Research 19: 2797-2803 |
| AK104 | Anti-PD-1 × anti-CTLA4 | Solid malignancies (e.g., gastric or | Ji et al., 2019, Annals of |
| | | gastroesophageal junction adenocarcinoma) | Oncology 30: v323-v324 |
| AMG160 | Anti-CD3 × anti-PSMA | Solid malignancies (e.g., prostate cancer) | NCT03792841 |
| AMG330 | Anti-CD3 × anti-CD33 | Relapsed or refractory acute myeloid leukemia | Aigner et al., 2013, Leukemia |
| | | | 27: 1107-1115 |
| AMG420 | Anti CD3 × anti-BCMA | Hematologic malignancies (e.g., multiple | Hipp et al., 2017, Leukemia |
| BI 836909 | | myeloma) | 31: 1743-1751 |
| AMG424 | Anti-CD3 × anti-CD38 | Hematologic malignancies (e.g., multiple | de Zafra et al., 2017, Blood |
| Xmab13551 | | myeloma) | 130: 500 and de Zafra et al., |
| | | | 2019, Clinical Cancer Research |
| | | | 25: 3921-3933 |
| AMG427 | Anti-CD3 × anti-FLT3 | Hematologic malignancies (e.g., acute | NCT03541369 |
| | | myeloid leukemia) | |
| AMG562 | Anti-CD3 × anti-CD19 | Lymphoma | Popplewell et al., 2019 |
| | | | Hematological Oncology |
| | | | 37: 566-567 |
| AMG596 | Anti-CD3 × anti-EGFRvIII | Solid malignancies (e.g., EGFRvIII+ | Rosenthal et al., 2019, |
| | | glioblastoma) | Neuro-oncology 21: 283 |
| AMG673 | Anti-CD3 × anti-CD33 | Hematologic malignancies (e.g., | Subklewe et al., 2019, |
| | | acute myeloid leukemia) | Blood 134: 833 |
| AMG701 | Anti-CD3 × anti BCMA | Hematologic malignancies (e.g., | Cho et al., 2018, Blood |
| | | multiple myeloma) | 132: 592 |
| AMG757 | Anti-CD3 × anti-DLL3 | Solid malignancies (e.g., small-cell | NCT03319940 |
| | | lung cancer) | |
| AMV-564 | Anti-CD3 × anti-CD33 | Hematologic malignancies (e.g., acute | Reusch et al., 2015, ASCO |
| | | myeloid leukemia and myelodysplastic | Annual Meeting Proceedings |
| | | syndrome) | |
| AMX-268 | Anti-CD3 × anti-EpCAM | Advanced solid tumors expressing EpCAM | Pearce et al., Poster 187 at |
| | | | 33rd Annual Meeting & Pre- |
| | | | Conference Programs of the |
| | | | Society for Immunotherapy of |
| | | | Cancer (SITC 2018), Washington, |
| | | | D.C., USA. 7-11 Nov. 2018. |
| APVO436 | Anti-CD3 × anti-CD123 | Hematologic malignancies (e.g., acute | Comeau et al., 2018, Cancer |
| | | myeloid leukemia and myelodysplastic | Research 78: 1786 |
| | | syndrome) | |
| ATTACK | Anti-EGFR × anti-CD3 | EGFR positive cancers | Harwood et al., 2017, |
| | | | OncoImmunology 7: 1, e1377874 |
| BI 836880 | Anti-ANG2 × anti-VEGF | Solid malignancies (e.g., non-small- | Hofmann et al., 2015, Poster |
| | | cell lung cancer) | presented at 8th Euro Global |
| | | | Summit on Cancer Therapy |
| Blinatumomab | Anti-CD3 × anti-CD19 | Hematologic malignancies (e.g., acute | Topp et al., 2012, Blood 120: |
| Blincyto | | lymphoblastic leukemia and B-cell acute | 5185-5187 |
| MT103 | | lymphoblastic leukemia) | |
| MEDI-538 | | | |
| AMG103 | | | |
| Bp-Bs | Anti-CD3 × anti-HER2 | HER2+ tumors | Liu et al., 2019, Mol. Ther. |
| | | | Oncolytics 14: 66-73 |
| Catumaxomab | Anti-CD3 × anti-EpCAM | Solid malignancies (e.g., malignant | Quintás-Cardama et al., 2010, |
| Removab | | ascites owing to epithelial carcinomas) | J Clin Oncol. 28: 884-92 |
| CC-93269 | Anti-CD3 × anti-BCMA | Hematologic malignancies (e.g., multiple | Seckinger et al., 2015 Blood |
| EM801 | | myeloma) | 126: 117 |
| Cibisatamab | Anti-CEA × anti-CD3 | Advanced CEA positive solid tumors | Tabernero et al., 2017, Journal |
| RG7802 | | | of Clinical Oncology, 35: 3002 |
| RO6958688 | | | |
| CEA-TCB | | | |
| Dilpacimab | Anti-DLL4 × anti-VEGF | Solid malignancies (e.g., colorectal | Li et al., 2018, Molecular |
| ABT-165 | | cancer) | cancer therapeutics 17: 1039-1050 |
| EMB01 | Anti-EGFR × anti-MET | Solid malignancies | NCT03797391 |
| Ertumaxomab | Anti-CD3 × anti-HER2 | HER-2 positive metastatic breast cancer | Kiewe et al., 2006, Clinical |
| | | | Cancer Research 12: 3085-3091 |
| ERY974 | Anti-CD3 × anti-FLTGPC33 | Solid malignancies (e.g., gastric cancer | Shiraiwa et al., 2019, Methods |
| | | and squamous cell oesophageal carcinoma) | 154: 10-20 |
| FBTA05 | Anti-CD3 × anti-CD20 | Relapsed or refractory B-cell lymphoma | Stanglmaier et al., 2008, Int. |
| | | after allogeneic SCT | J. Cancer 123: 1181-1189 |
| FS118 | Anti-PD-L1 × anti-LAG3 | Solid malignancies | Kraman et al., 2020 Clinical Cancer |
| | | | Research Online publication DOI: |
| | | | 10.1158/1078-0432.CCR-19-3548 |
| Gatipotuzumab- | Anti-TA-MUC1 × anti-CD3 | Solid tumors | https://www.glycotope.com/ |
| based T cell | | | biopharmaceuticals-pipeline/ |
| engager PM-CD3 | | | |
| GBR1302 | Anti-CD3 × anti-HER2 | Solid malignancies (e.g., HER2+ cancers) | Back et al., 2018, poster presented |
| | | | at the 54th Annual Meeting of the |
| | | | American Society of Clinical Oncology, |
| | | | Jun. 1-5, 2018 |
| | | | NCT02829372 |
| GBR1342 | Anti-CD3 × anti-CD38 | Hematologic malignancies (e.g., | Richter et al., 2018, J Clinical |
| | | multiple myeloma) | Oncol. 36: TPS3132 |
| GEM333 | Anti-CD3 × anti-CD33 | Hematologic malignancies (e.g., | NCT03516760 |
| | | acute myeloid leukemia) | |
| GEN3013 | Anti-CD3 × anti-CD20 | Hematologic malignancies (e.g., diffuse | Hiemstra et al., 2018, Blood |
| DuoBody- | | large B cell lymphoma, follicular | 132: 1664-1664 |
| CD3 × CD20 | | lymphoma and mantle cell lymphoma) | |
| GTB-3550 | Anti-CD16 × anti-CD33 | Hematologic malignancies (e.g., | NCT03214666 |
| OXS-3550 | | myelodysplastic syndrome, acute | |
| | | myeloid leukemia and systemic | |
| | | mastocytosis) | |
| IBI318 | Anti-PD-1 × anti- | Solid malignancies | NCT03875157 |
| | undisclosed TAA | | |
| INBRX-105 | Anti-PD-L1 × anti-4-1BB | Hematologic and solid malignancies | NCT03809624 |
| | | (e.g., lymphoma and solid tumors) | |
| JNJ-61186372 | Anti-EGFR × anti-MET | Solid malignancies (e.g., non-small- | Grugan et al., 2017, mAbs |
| | | cell lung cancer) | 9: 114-126 |
| JNJ-63709178 | Anti-CD3 × anti-CD123 | Hematologic malignancies (e.g., acute | Gaudet et al., 2016, Blood |
| | | myeloid leukemia) | 128: 2824 |
| JNJ-64007957 | Anti-CD3 × anti-BCMA | Hematologic malignancies (multiple | Girgis et al., 2016, Blood |
| | | myeloma) | 128:5668 |
| JNJ-64407564 | Anti-CD3 × anti-GPRC5D | Hematologic malignancies (e.g., multiple | Kodama et al., 2019, Molecular |
| | | myeloma) | Cancer Therapeutics 18: 1555-1564 |
| KN026 | Anti-HER2 × anti-HER2 | Solid malignancies (e.g., breast and | Wei et al., 2017, Oncotarget |
| | | gastric cancer) | 8: 51037-51049 |
| KN046 | Anti-PD-L1 × anti-CTLA4 | Solid and hematologic malignancies (e.g., | Coward et al., 2019, Journal of |
| | | triple-negative breast cancer, non- | Clinical Oncology 37: 2554 |
| | | small-cell lung cancer and lymphoma) | |
| LY3164530 | Anti-Her1 × anti-cMET | Advanced or metastatic cancer | Liu et al., 2016 Cancer Research |
| | | | 76: 873-873. |
| LY3415244 | Anti-PD-L1 × anti-TIM3 | Solid malignancies | Hellmann et al., 2019, American |
| | | | Society of Clinical Oncology (ASCO) |
| | | | Annual Meeting; Chicago, IL; May |
| | | | 31-Jun. 4, 2019: TPS2654 |
| M802 | Anti-CD3 × anti-HER2 | Solid malignancies (e.g., breast cancer | Labrijn refers to phase I trial but |
| | | and gastric cancer) | there's nothing out there (and they |
| | | | misspell it as YZYbio . . .) |
| MBS301 | Anti-HER2 × anti-HER2 | Solid malignancies (e.g., HER2+ solid | Sijia et al., 2018, mAbs 10: 864-875 |
| | | tumors) | |
| MCLA-145 | Anti-PD-L1 × anti-4-1BB | Solid malignancies | Mayes et al., 2019, Poster presented |
| | | | at the American Association for Cancer |
| | | | Research (AACR) 2019 Annual Meeting, |
| | | | Atlanta, GA, USA. |
| MCLA-158 | Anti-EGFR × anti-LGR5 | Solid malignancies (e.g., colorectal | Roovers et al., 2017, Poster presented |
| | | cancer) | at the American Association for Cancer |
| | | | Research (AACR) 2017 Annual Meeting, |
| | | | Washington, DC, USA. |
| MEDI5752 | Anti-PD-1 × anti-CTLA4 | Solid malignancies | Dovedi et al., 2018, Cancer Research |
| | | | 78: abstract 2776 |
| MGD006 | Anti-CD3 × anti-CD123 | Relapsed/refractory acute myeloid | Vey et al., 2017, Journal of Clinical |
| S80880 | | leukemia or intermediate 2/high | Oncology 35; abstr TPS7070 |
| | | risk myelodysplastic syndrome | |
| MGD007 | Anti-CD3 × anti-GPA33 | Relapsed refractory metastatic | Moore et al., 2014, Cancer Research |
| | | colorectal cancer | 74: 669 |
| MGD011 | Anti-CD19 × anti-CD3 | B-cell malignancies | Liu et al., 2017, Clinical Cancer. |
| | | | Research 23: 1506-1518 |
| MGD013 | Anti-PD-1 × anti-LAG3 | Solid and hematologic malignancies | LaMotte-Mohs et al., 2016, Cancer |
| | | | Res 76(14 Suppl): Abstract 3217 |
| MGD019 | Anti-PD-1 × anti-CTLA4 | Solid malignancies | Luke et al., 2019, Journal of |
| | | | Clinical Oncology 37: TPS2661 |
| MM111 | Anti-Her2 × anti-Her3 | Her-2 positive advanced solid tumors | Beeram et al., 2010 Cancer Research |
| | | | 70: 6-15 |
| MM141 | Anti-IGF1R × anti-Her3 | Advanced solid tumors | Friedrich et al., 2012, Mol Cancer |
| | | | Ther. 11: 2664-2673 |
| MOR209 | Anti-PSMA × anti-CD3 | Metastatic castrate resistant prostate | Hernandez-Hoyos et al., 2016, |
| ES414 | | cancer | Molecular cancer therapeutics |
| | | | 15: 2155-2165 |
| MOR209 | Anti-CD3 × anti-PSMA | Solid malignancies (e.g., prostate cancer) | Hernandez-Hoyos et al., 2016, |
| APVO414 | | | Mol. Cancer Ther. 15: 2155-2165 |
| ES414 | | | |
| Mosunetuzumab | Anti-CD3 × anti-CD20 | Hematologic malignancies (e.g., chronic | Budde et al., 2018, Blood 132: 399 |
| RG7828 | | lymphocytic leukemia, non-Hodgkin | |
| RO7030816 | | lymphoma and diffuse large B cell lymphoma) | |
| BTCT4465A | | | |
| MT110 | Anti-CD3 × anti-EpCAM | Advanced solid tumors expressing EpCAM | Fiedler et al., 2010, Journal of |
| AMG 110 | | | Clinical Oncology 28: 2573-2573 |
| MT111 | Anti-CD3 × anti-CEA | Advanced GI adenocarcinomas | El-Sahwi et al., 2010, Br J Cancer |
| AMG211 | | | 102: 134-143 |
| MEDI-565 | | | |
| MT112 | Anti-CD3 × anti-PSMA | Metastatic castrate resistant prostate | 25th EORTC-NCI-AACR., 2013, |
| BAY2010112 | | cancer | abstract C169 |
| NOV1501 | Anti-DLL4 × anti-VEGF | Solid malignancies | Lee et al., 2019, Journal of |
| ABL001 | | | Clinical Oncology 37: 3023 |
| TR009 | | | |
| OMP-305B83 | Anti-DLL4 × anti-VEGF | Advanced solid tumors | Jimeno et al., 2016, European |
| Navicixizumab | | | Journal of Cancer 69: S35 |
| Orlotamab | Anti-CD3 × anti-B7-H3 | Solid malignancies (non-small-cell lung | Tolcher et al., 2016, Journal of |
| MGD009 | | cancer and melanoma) | Clinical Oncology 37: TPS3105 |
| OXS-1550 | Anti-CD19 × anti-CD22 | Hematologic malignancies (e.g., B cell | Vallera et al., 2010, Molecular |
| DT2219ARL | | lymphoma and leukemia) | Cancer Therapeutics 9: 1872-1883 |
| Pasotuxizumab | Anti-CD3 × anti-PSMA | Solid malignancies (e.g., | Friedrich et al., 2012, Mol. |
| A212 | | prostate cancer) | Cancer Ther. 11: 2664-2673 |
| BAY2010112 | | | |
| PF-06671008 | Anti-CD3 × anti-P-cadherin | Solid malignancies (e.g., triple- | Root et al., 2016, Antibodies |
| | | negative breast cancer, non-small- | 5: 6 |
| | | cell lung cancer and colorectal cancer) | |
| PF-06863135 | Anti-CD3 × anti-BCMA | Hematologic malignancies (e.g., | Lesokhin et al., 2018, Blood |
| | | multiple myeloma) | 132: 3229 |
| Plamotamab | Anti-CD3 × anti-CD20 | Hematologic malignancies (e.g., | Chu et al., 2014, Blood 124: 3111 |
| XmAb13676 | | non-Hodgkin lymphoma and chronic | |
| | | lymphocytic leukemia) | |
| PRS-343 | Anti-HER2 × anti 4-1BB | HER2-positive solid tumors | Hinner et al., 2019, Clinical |
| | | | Cancer Research 25: 5878-5878 |
| REGN1979 | Anti-CD3 × anti-CD20 | Hematologic malignancies (e.g., | Smith et al., 2015, Scientific |
| | | follicular lymphoma, chronic | Reports 5: 17943 |
| | | lymphocytic leukemia and non- | |
| | | Hodgkin lymphoma) | |
| REGN4018 | Anti-CD3 × anti-MUC16 | Solid malignancies (e.g., | Crawford et al., 2019, Science |
| | | ovarian, fallopian tube or | Translational Medicine 11: |
| | | peritoneal cancers) | eaau7534. |
| REGN5458 | Anti-CD3 × anti-BCMA | Hematologic malignancies (e.g., | Dilillo et al., 2018, Blood |
| | | multiple myeloma) | 132: 1944 |
| RG6160, | Anti-CD3 × anti-FcRH5 | Hematologic malignancies (e.g., | NCT03275103 |
| RO7187797, | (CD307) | multiple myeloma) | |
| BFCR4350A | | | |
| RG6194 | Anti-CD3 × anti-HER2 | Solid malignancies (e.g., locally | NCT03448042 |
| BTRC4017A | | advanced or metastatic HER2- | |
| | | expressing cancers) | |
| RG7221 | Anti-angiopoietin 2 × | Advanced solid tumors | Kerbel et al., 2008, N Engl |
| RO5520985 | anti-VEGF-A | | J Med. 358: 2039-2049 |
| RG7597 | Anti-Her-1 × anti-Her-3 | Locally advanced or metastatic | Schaefer et al., 2011, Cancer |
| MEHD7945A | | epithelial tumors | Cell. 20: 472-486 |
| RO5541078 | | | |
| RO7082859 | Anti-CD3 × anti-CD20 | Hematologic malignancies (e.g., | Djebli et al., 2019, Blood |
| RG6026 | | non-Hodgkin lymphoma) | 134: 3799 |
| CD20-TCB | | | |
| RO7121661 | Anti-PD-1 × anti-TIM3 | Solid malignancies (e.g., non-small- | NCT03708328 |
| RG7769 | | cell lung cancer and melanoma) | |
| SAR440234 | Anti-CD3 × anti-CD123 | Hematologic malignancies (e.g., | NCT03594955 |
| | | acute myeloid leukemia, B-cell | |
| | | acute lymphoblastic leukemia and | |
| | | myelodysplastic syndrome) | |
| Tepoditamab | Anti-CD3 × anti-CLEC12A | Hematologic malignancies (e.g., | van Loo et al., 2019, Expert |
| MCLA-117 | | acute myeloid leukemia) | Opinion on Biological Therapy |
| | | | 19: 721-733 |
| TG-1801 | Anti-CD47 × anti-CD19 | Hematologic malignancies | Normant et al., 2019, Hematological |
| NI-1701 | | (e.g., B cell lymphoma) | Oncology 37: 322-323 |
| Tidutamab | Anti-CD3 × anti-SSTR2 | Solid malignancies (e.g., | NCT03411915 |
| XmAb18087 | | neuroendocrine and GIST) | |
| Vibecotamab | Anti-CD3 × anti-CD123 | Hematologic malignancies (e.g., | Chu et al., 2014, Blood1 24: 2316 |
| Xmab14045 | | acute myeloid leukemia, B-cell | |
| | | acute lymphoblastic leukemia and | |
| | | chronic myeloid leukemia) | |
| XmAb20717 | Anti-PD-1 × anti-CTLA4 | Solid malignancies | Hedvat et al., 2018, Cancer |
| | | | Research 78: abstract 2784 |
| XmAb23104 | Anti-PD-1 × anti-ICOS | Solid malignancies | Hedvat et al., 2018, Cancer |
| | | | Research 78: 2784 |
| Zenocutuzumab | Anti-HER2 × anti-HER3 | Solid malignancies (e.g., | de Vries Schultink et al., 2018 |
| MCLA-128 | | breast cancer) | Investigational New Drugs |
| PB4188 | | | 36: 1006-1015 |
| ZW25 | Anti-HER2 × anti-HER2 | Solid malignancies (e.g., | Weisser et al., 2017, Cancer. |
| | | HER2+ solid tumors) | Research 77: 31 |
| ZW49 | Anti-HER2 × anti-HER2 | Solid malignancies (e.g., | Hamblett et al., 2018, Cancer. |
| | ADC | HER2+ solid tumors | Research 8: Abstract 3914 |

[1083] Accordingly, the molecules of the disclosure can be administered in combination with any MBM described [Table 25], for example to treat a cancer indicated for that MBM in [Table 25] above.

[1084] In other embodiments, the MBM described in [Table 25] binds to BCMA, for example the AMG701, AMG701, CC-93269, JNJ-64007957, PF-06863135, or REGN5458. The molecules of the disclosure can be used in combination with any of the foregoing BCMA-targeting MBMs to treat hematologic cancers such as multiple myeloma, Hodgkin's and non-Hodgkin's lymphoma, various leukemias, and glioblastoma.

[1085] In other embodiments, the MBM described in [Table 25] binds to CD19, for example the MBM is A-319, AMG562, Blinatumomab, MGD011, or OXS-1550. The molecules of the disclosure can be used in combination with any of the foregoing CD19-targeting MBMs to treat hematologic cancers such as non-Hodgkin's lymphoma (B-NHL), chronic lymphocytic leukemia, and acute lymphoblastic leukemia.

### Other Therapeutic Agents

[1086] In another embodiment, the ZBTB32 inhibitor, or a pharmaceutically acceptable salt, hydrate, solvate, prodrug, stereoisomer, or tautomer thereof, of the present disclosure are used in combination with one or more of the therapeutic agents listed in Table 26 or listed in the patent and patent applications cited in Table 26, to treat cancer. Each publication listed in Table 26 is herein incorporated by reference in its entirety, including all structural formulae therein.

TABLE 26
Other Exemplary Therapeutic Agents

| Second | | | Patents/Patent |
|---|---|---|---|
| agent | Generic Name | | Application |
| No. | Tradename | Compound Structure | Publications |
| A1 | Sotrastaurin | [chemical structure] | EP 1682103 US 2007/142401 WO 2005/039549 |
| A2 | Nilotinib HCl monohydrate TASIGNA ® | [chemical structure] | WO 2004/005281 U.S. Pat. No. 7,169,791 |
| A3 | | [chemical structure] | WO2011/023773 |
| A4 | | [chemical structure] | WO2012/149413 |
| A6 | | [chemical structure] | WO 2010/029082 |
| A7 | | [chemical structure] | WO2015/107493 |
| A8 | | | WO2015/107495 |
| A9 | | [chemical structure] | WO 2011/076786 |
| A10 | Deferasirox EXJADE ® | [chemical structure] | WO 1997/049395 |
| A11 | Letrozole FEMARA ® | [chemical structure] | U.S. Pat. No. 4,978,672 |
| A12 | | [chemical structure] | WO 2013/124826 US 2013/0225574 |
| A13 | | [chemical structure] | WO 2013/111105 |
| A14 | | [chemical structure] | WO2007/121484 |
| A15 | Imatinib mesylate GLEEVEC ® | [chemical structure] | WO 1999/003854 |
| A16 | Capmatinib | [chemical structure] | EP 2099447 U.S. Pat. No. 7,767,675 U.S. Pat. No. 8,420,645 |
| A17 | Ruxolitinib Phosphate JAKAFI ® | [chemical structure] | WO 2007/070514; EP 2474545 U.S. Pat. No. 7,598,257; WO 2014/018632 |
| A18 | Panobinostat | [chemical structure] | WO 2014/072493 WO 2002/022577 EP 1870399 |
| A20 | | [chemical structure] | WO 2008/016893 EP 2051990 U.S. Pat. No. 8,552,003 |
| A21 | | [chemical structure] | WO2015/022662 |
| A22 | ceritinib ZYKADIA ™ | [chemical structure] | WO 2008/073687 U.S. Pat. No. 8,039,479 |
| A23 | Ribociclib KISQALI ® | [chemical structure] | U.S. Pat. No. 8,415,355 U.S. Pat. No. 8,685,980 |
| A24 | | [chemical structure] | WO 2010/007120 |
| A26 | | [chemical structure] | WO 2011/101409 |
| A27 | | Human monoclonal antibody to HER3 | WO 2012/022814 |
| | | | EP 2606070 |
| | | | U.S. Pat. No. 8,735,551 |
| A28 | | Antibody Drug Conjugate (ADC) | WO 2014/160160 |
| A29 | | Monoclonal antibody or Fab to M-CSF | WO 2004/045532 |
| A30 | Midostaurin | [chemical structure] | WO 2003/037347 EP 1441737 US 2012/252785 |
| A31 | Everolimus AFINITOR ® | [chemical structure] | WO 1994/009010 WO 2014/085318 |
| A32 | | [chemical structure] | WO 2007/030377 U.S. Pat. No. 7,482,367 |
| A34 | | [chemical structure] | WO 2006/122806 |
| A35 | | [chemical structure] | WO 2008/073687 U.S. Pat. No. 8,372,858 |
| A36 | Valspodar AMDRAY ™ | [chemical structure] | EP 296122 |
| A37 | Vatalanib succinate | [chemical structure] | WO 98/35958 |
| A38 | | [chemical structure] | WO2014/141104 |
| A39 | Asciminib | [chemical structure] | WO2013/171639 WO2013/171640 WO2013/171641 WO2013/171642 |
| A42 | | [chemical structure] | WO2010/015613 WO2013030803 U.S. Pat. No. 7,989,497, |
| A43 | | | WO 2017/025918 |
| | | | WO2011/121418 |
| | | | U.S. Pat. No. 8,796,284 |
| A44 | | [chemical structure] | WO2010/101849 |
| A45 | | [chemical structure] | WO2014/130310 |
| A46 | trametinib | [chemical structure] | WO2005/121142 U.S. Pat. No. 7,378,423 |
| A47 | dabrafenib | [chemical structure] | WO 2009/137391 U.S. Pat. No. 7,994,185 |
| A49 | octreotide | [chemical structure] | U.S. Pat. No. 4,395,403 EP 0 029 579 |
| A50 | | [chemical structure] | WO 2016/103155 U.S. Pat. No. 9,580,437 EP 3237418 |
| A51 | | [chemical structure] | U.S. Pat. No. 9,512,084 WO/2015/079417 |
| A52 | | [chemical structure] | WO 2010/002655 U.S. Pat. No. 8,519,129 |
| A53 | | [chemical structure] | WO 2010/002655 U.S. Pat. No. 8,519,129 |
| A54 | | [chemical structure] | WO 2010/002655 |

### Pharmaceutical Compositions for ZBTB32 Inhibitors

[1087] In another aspect, the present disclosure provides compositions, e.g., pharmaceutically acceptable compositions, which includes a ZBTB32 inhibitor (e.g., a ZBTB32 inhibitor described herein), alone or in combination with a second therapeutic agent (e.g., a therapeutic agent described herein), formulated together with a pharmaceutically acceptable carrier. As used herein, “pharmaceutically acceptable carrier” includes any and all solvents, dispersion media, isotonic and absorption delaying agents, and the like that are physiologically compatible. The carrier can be suitable for intravenous, intramuscular, subcutaneous, parenteral, rectal, spinal or epidermal administration (e.g. by injection or infusion).

[1088] The compositions of this disclosure may be in a variety of forms. These include, for example, liquid, semi-solid and solid dosage forms, such as liquid solutions (e.g., injectable and infusible solutions), dispersions or suspensions, liposomes and suppositories. The preferred form depends on the intended mode of administration and therapeutic application. Typical compositions are in the form of injectable or infusible solutions. In certain embodiments, the mode of administration is parenteral (e.g., intravenous, subcutaneous, intraperitoneal, or intramuscular). In an embodiment, the composition is administered by intravenous infusion or injection. In another embodiment, the composition is administered by intramuscular or subcutaneous injection.

[1089] The phrases “parenteral administration” and “administered parenterally” as used herein means modes of administration other than enteral and topical administration, usually by injection, and includes, without limitation, intravenous, intramuscular, intraarterial, intrathecal, intracapsular, intraorbital, intracardiac, intradermal, intraperitoneal, transtracheal, subcutaneous, subcuticular, intraarticular, subcapsular, subarachnoid, intraspinal, epidural and intrasternal injection and infusion.

[1090] Therapeutic compositions typically should be sterile and stable under the conditions of manufacture and storage. The composition can be formulated as a solution, microemulsion, dispersion, liposome, or other ordered structure suitable to high antibody concentration. Sterile injectable solutions can be prepared by incorporating the active compound (i.e., antibody or antibody portion) in the required amount in an appropriate solvent with one or a combination of ingredients enumerated above, as required, followed by filtered sterilization. Generally, dispersions are prepared by incorporating the active compound into a sterile vehicle that contains a basic dispersion medium and the required other ingredients from those enumerated above. In the case of sterile powders for the preparation of sterile injectable solutions, the preferred methods of preparation are vacuum drying and freeze-drying that yields a powder of the active ingredient plus any additional desired ingredient from a previously sterile-filtered solution thereof. The proper fluidity of a solution can be maintained, for example, by the use of a coating such as lecithin, by the maintenance of the required particle size in the case of dispersion and by the use of surfactants. Prolonged absorption of injectable compositions can be brought about by including in the composition an agent that delays absorption, for example, monostearate salts and gelatin.

[1091] In some embodiments, a ZBTB32 inhibitor (e.g., a ZBTB32 inhibitor described herein), alone or in combination with a second therapeutic agent (e.g., a therapeutic agent described herein), can be formulated into a formulation (e.g., a dose formulation or dosage form) suitable for administration (e.g., intravenous administration) to a subject as described herein.

[1092] The therapeutic agents, e.g., inhibitors, antagonist or binding agents, can be administered by a variety of methods known in the art, although for many therapeutic applications, the preferred route/mode of administration is intravenous injection or infusion. As will be appreciated by the skilled artisan, the route and/or mode of administration will vary depending upon the desired results. In certain embodiments, the active compound may be prepared with a carrier that will protect the compound against rapid release, such as a controlled release formulation, including implants, transdermal patches, and microencapsulated delivery systems. Biodegradable, biocompatible polymers can be used, such as ethylene vinyl acetate, polyanhydrides, polyglycolic acid, collagen, polyorthoesters, and polylactic acid. Many methods for the preparation of such formulations are patented or generally known to those skilled in the art. See, e.g., Sustained and Controlled Release Drug Delivery Systems, J. R. Robinson, ed., Marcel Dekker, Inc., New York, 1978.

[1093] In certain embodiments, a therapeutic agent or compound can be orally administered, for example, with an inert diluent or an assimilable edible carrier. The compound (and other ingredients, if desired) may also be enclosed in a hard or soft shell gelatin capsule, compressed into tablets, or incorporated directly into the subject's diet. For oral therapeutic administration, the compounds may be incorporated with excipients and used in the form of ingestible tablets, buccal tablets, troches, capsules, elixirs, suspensions, syrups, wafers, and the like. To administer a compound of the disclosure by other than parenteral administration, it may be necessary to coat the compound with, or co-administer the compound with, a material to prevent its inactivation. Therapeutic compositions can also be administered with medical devices known in the art.

[1094] Dosage regimens are adjusted to provide the optimum desired response (e.g., a therapeutic response). For example, a single bolus may be administered, several divided doses may be administered over time or the dose may be proportionally reduced or increased as indicated by the exigencies of the therapeutic situation. It is especially advantageous to formulate parenteral compositions in dosage unit form for ease of administration and uniformity of dosage. Dosage unit form as used herein refers to physically discrete units suited as unitary dosages for the subjects to be treated; each unit contains a predetermined quantity of active compound calculated to produce the desired therapeutic effect in association with the required pharmaceutical carrier. The specification for the dosage unit forms of the disclosure are dictated by and directly dependent on (a) the unique characteristics of the active compound and the particular therapeutic effect to be achieved, and (b) the limitations inherent in the art of compounding such an active compound for the treatment of sensitivity in individuals.

[1095] The pharmaceutical compositions of the disclosure may include a “therapeutically effective amount” or a “prophylactically effective amount” of a compound of the disclosure. A “therapeutically effective amount” refers to an amount effective, at dosages and for periods of time necessary, to achieve the desired therapeutic result. A therapeutically effective amount of a compound may vary according to factors such as the disease state, age, sex, and weight of the individual, and the ability of the compound to elicit a desired response in the individual. A therapeutically effective amount is also one in which any toxic or detrimental effects of the compound is outweighed by the therapeutically beneficial effects. A “therapeutically effective dosage” preferably inhibits a measurable parameter, e.g., tumor growth rate by at least about 20%, more preferably by at least about 40%, even more preferably by at least about 60%, and still more preferably by at least about 80% relative to untreated subjects. The ability of a compound to inhibit a measurable parameter, e.g., cancer, can be evaluated in an animal model system predictive of efficacy in human tumors. Alternatively, this property of a composition can be evaluated by examining the ability of the compound to inhibit, such inhibition in vitro by assays known to the skilled practitioner.

[1096] A “prophylactically effective amount” refers to an amount effective, at dosages and for periods of time necessary, to achieve the desired prophylactic result. Typically, since a prophylactic dose is used in subjects prior to or at an earlier stage of disease, the prophylactically effective amount will be less than the therapeutically effective amount.

### Biomarkers

[1097] In certain embodiments, any of the methods disclosed herein further includes evaluating or monitoring the effectiveness of a therapy (e.g., a monotherapy or a combination therapy) described herein, in a subject (e.g., a subject having a cancer, e.g., a cancer described herein). The method includes acquiring a value of effectiveness to the therapy, wherein said value is indicative of the effectiveness of the therapy.

[1098] In embodiments, the value of effectiveness to the therapy comprises a measure of one, two, three, four, five, six, seven, eight, nine or more (e.g., all) of the following:
[1099] (i) a parameter of a tumor infiltrating lymphocyte (TIL) phenotype;
[1100] (ii) a parameter of a myeloid cell population;
[1101] (iii) a parameter of a surface expression marker;
[1102] (iv) a parameter of a biomarker of an immunologic response;
[1103] (v) a parameter of a systemic cytokine modulation;
[1104] (vi) a parameter of circulating free DNA (cfDNA);
[1105] (vii) a parameter of systemic immune modulation;
[1106] (viii) a parameter of microbiome;
[1107] (ix) a parameter of a marker of activation in a circulating immune cell; or
[1108] (x) a parameter of a circulating cytokine.

[1109] In some embodiments, the parameter of a TIL phenotype comprises the level or activity of one, two, three, four or more (e.g., all) of Hematoxylin and eosin (H&E) staining for TIL counts, CD8, FOXP3, CD4, or CD3, in the subject, e.g., in a sample from the subject (e.g., a tumor sample).

[1110] In some embodiments, the parameter of a myeloid cell population comprises the level or activity of one or both of CD68 or CD163, in the subject, e.g., in a sample from the subject (e.g., a tumor sample).

[1111] In some embodiments, the parameter of a surface expression marker comprises the level or activity of one or more (e.g., two, three, four, or all) of PD-1, PD-L1, LAG-3, TIM-3, or GITR, in the subject, e.g., in a sample from the subject (e.g., a tumor sample). In certain embodiments, the level of PD-1, PD-L1, LAG-3, TIM-3, or GITR is determined by immunohistochemistry (IHC).

[1112] In some embodiments, the parameter of a biomarker of an immunologic response comprises the level or sequence of one or more nucleic acid-based markers, in the subject, e.g., in a sample from the subject (e.g., a tumor sample).

[1113] In some embodiments, the parameter of systemic cytokine modulation comprises the level or activity of one, two, three, four, five, six, seven, eight, or more (e.g., all) of IL-18, IFN-γ, ITAC (CXCL11), IL-6, IL-1β, IL-4, IL-17, IL-15, or TGF-beta, in the subject, e.g., in a sample from the subject (e.g., a blood sample, e.g., a plasma sample).

[1114] In some embodiments, the parameter of cfDNA comprises the sequence or level of one or more circulating tumor DNA (cfDNA) molecules (e.g., tumor mutation burden), in the subject, e.g., in a sample from the subject (e.g., a blood sample, e.g., a plasma sample).

[1115] In some embodiments, the parameter of systemic immune-modulation comprises phenotypic characterization of an activated immune cell, e.g., a CD3-expressing cell, a CD8-expressing cell, or both, in the subject, e.g., in a sample from the subject (e.g., a blood sample, e.g., a PBMC sample).

[1116] In some embodiments, the parameter of microbiome comprises the sequence or expression level of one or more genes in the microbiome, in the subject, e.g., in a sample from the subject (e.g., a stool sample).

[1117] In some embodiments, the parameter of a marker of activation in a circulating immune cell comprises the level or activity of one, two, three, four, five or more (e.g., all) of circulating CD8+, HLA-DR+Ki67+, T cells, IFN-γ, IL-18, or CXCL 11 (IFN-γ induced CCK) expressing cells, in a sample (e.g., a blood sample, e.g., a plasma sample).

[1118] In some embodiments, the parameter of a circulating cytokine comprises the level or activity of IL-6, in the subject, e.g., in a sample from the subject (e.g., a blood sample, e.g., a plasma sample).

[1119] In some embodiments of any of the methods disclosed herein, the therapy comprises a combination described herein (e.g., a combination comprising a therapeutically effective amount of a PD-1 inhibitor described herein).

[1120] In some embodiments of any of the methods disclosed herein, the measure of one or more of (i)-(x) is obtained from a sample acquired from the subject. In some embodiments, the sample is chosen from a tumor sample, a blood sample (e.g., a plasma sample or a PBMC sample), or a stool sample.

[1121] In some embodiments of any of the methods disclosed herein, the subject is evaluated prior to receiving, during, or after receiving, the therapy.

[1122] In some embodiments of any of the methods disclosed herein, the measure of one or more of (i)-(x) evaluates a profile for one or more of gene expression, flow cytometry or protein expression.

[1123] In some embodiments of any of the methods disclosed herein, the presence of an increased level or activity of one, two, three, four, five, or more (e.g., all) of circulating CD8+, HLA-DR+Ki67+, T cells, IFN-γ, IL-18, or CXCL11 (IFN-γ induced CCK) expressing cells, and/or the presence of an decreased level or activity of IL-6, in the subject or sample, is a positive predictor of the effectiveness of the therapy.

[1124] Alternatively, or in combination with the methods disclosed herein, responsive to said value, performing one, two, three, four or more (e.g., all) of:
[1125] (i) administering to the subject the therapy;
[1126] (ii) administered an altered dosing of the therapy;
[1127] (iii) altering the schedule or time course of the therapy;
[1128] (iv) administering to the subject an additional agent (e.g., a therapeutic agent described herein) in combination with the therapy; or
[1129] (v) administering to the subject an alternative therapy.

### Kits for ZBTB32 Inhibitors

[1130] A combination of therapeutic agents disclosed herein can be provided in a kit. The therapeutic agents are generally provided in a vial or a container. As appropriate, the therapeutic agents can be in liquid or dried (e.g., lyophilized) form. The kits can comprise two or more (e.g., three, four, five, or all) of the therapeutic agents of a combination disclosed herein. In some embodiments, the kit further contains a pharmaceutically acceptable diluent. The therapeutic agents can be provided in the kit in the same or separate formulations (e.g., as mixtures or in separate containers). The kits can contain aliquots of the therapeutic agents that provide for one or more doses. If aliquots for multiple administrations are provided, the doses can be uniform or varied. Varied dosing regimens can be escalating or decreasing, as appropriate. The dosages of the therapeutic agents in the combination can be independently uniform or varying. The kit can include one or more other elements including: instructions for use; other reagents, e.g., a label, or an agent useful for chelating, or otherwise coupling, a therapeutic agent to a label or therapeutic agent, or a radioprotective composition; devices or other materials for preparing the antibody for administration; pharmaceutically acceptable carriers; and devices or other materials for administration to a subject.

### IKZF2 Inhibitors

[1131] In some embodiments, the ZBTB32 inhibitor, or a pharmaceutically acceptable salt, hydrate, solvate, prodrug, stereoisomer, or tautomer thereof, can be used in combination with an inhibitor of IKAROS Family Zinc Finger 2 (IKZF2), for making a CAR-expressing cell, e.g., an CAR-expressing immune effector cell, or for treating a disease, e.g., cancer.

[1132] In some embodiments, the IKZF2 inhibitor comprises a compound of Formula (I′)

[chemical structure]

[1133] wherein:
[1134] X₁ and X₂ are each independently H, (C₁-C₄)alkyl, (C₁-C₆)alkoxy, (C₁-C₄)haloalkyl, (C₁-C₆)haloalkoxy, (C₃-C₇)cycloalkyl, halogen, —CN, —OH, or —NH₂;
[1135] Rₓ is or D;
[1136] R₁ is

[chemical structure]

[1137] each R₂ is independently at each occurrence (C₁-C₆)alkyl, (C₁-C₆)alkoxy, (C₁-C₆)haloalkyl, (C₁-C₆)haloalkoxy, halogen, —CN, —OH, or —NH₂; or
[1138] two R₂ together with the carbon atoms to which they are attached form a (C₃-C₇)cycloalkyl or a 4- to 7-membered heterocycloalkyl ring comprising 1-3 heteroatoms selected from O, N, and S; or two R₂ together when on adjacent carbon atoms form a phenyl or a 5- or 6-membered heteroaryl ring comprising 1-3 heteroatoms selected from O, N, and S; or
[1139] R₂ and R₆ together with the carbon and nitrogen atoms to which they are attached form a 4- to 6-membered heterocycloalkyl ring optionally comprising 1-2 additional heteroatoms selected from 0, N, and S, and optionally substituted with one to four substituents each independently selected from (C1-C₆)alkyl, (C1-C₆)haloalkyl, halogen, —OH, —CN, and —NH₂;
[1140] each R₃ is (C₁-C₆)alkyl, (C₁-C₆)alkoxy, (C₁-C₆)haloalkyl, (C₁-C₆)haloalkoxy, halogen, —OH, or —NH₂;
[1141] R₄ is —OR₅ or —NR₆R₆;
[1142] R₅ is H, (C₁-C₆)alkyl, (C₁-C₆)haloalkyl, (C₃-C₇)cycloalkyl, 5- or 6-membered heterocycloalkyl comprising 1-3 heteroatoms selected from O, N, and S, (C₆-C₁₀)aryl, or 5- or 6-membered heteroaryl comprising 1-3 heteroatoms selected from O, N, and S, wherein the alkyl is optionally substituted with one to three substituents independently selected from (C₆-C₁₀)aryl and 5- or 6-membered heteroaryl comprising 1-3 heteroatoms selected from O, N, and S;
[1143] R₆ and R₆, are each independently H, (C1-C₆)alkyl, (C1-C₆)haloalkyl, (C₂-C₆)hydroxyalkyl, (C₃-C₇)cycloalkyl, 5- or 6-membered heterocycloalkyl comprising 1-3 heteroatoms selected from O, N, and S, (C₆-C₁₀)aryl, or 5- or 6-membered heteroaryl comprising 1-3 heteroatoms selected from O, N, and S, wherein the alkyl is optionally substituted with one to three R₇ and wherein the cycloalkyl, heterocycloalkyl, aryl, and heteroaryl are optionally substituted with one to four R₁₂; or
[1144] R₆ and R₆, together with the nitrogen atom to which they are attached form a 4- to 8-membered heterocycloalkyl ring optionally comprising 1-2 additional heteroatoms selected from O, N, and S, and optionally substituted with one to four R₈; or R₂ and R₆ together with the carbon and nitrogen atoms to which they are attached form a 4- to 6-membered heterocycloalkyl ring optionally comprising 1-2 additional heteroatoms selected from 0, N, and S, and optionally substituted with one to four substituents each independently selected from (C₁-C₆)alkyl, (C₁-C₆)haloalkyl, halogen, —OH, —CN, and —NH₂;
[1145] each R₇ is (C₃-C₇)cycloalkyl, 4- to 7-membered heterocycloalkyl ring comprising 1-3 heteroatoms selected from O, N, and S, (C₆-C₁₀)aryl, or 5- or 6-membered heteroaryl comprising 1-3 heteroatoms selected from O, N, and S, wherein the cycloalkyl, heterocycloalkyl, aryl, and heteroaryl are optionally substituted with one to four R₉;
[1146] each R₈ is independently at each occurrence halogen, (C1-C₆)alkyl, (C1-C₆)alkoxy, (C1-C₆)haloalkyl, (C1-C₆)haloalkoxy, —CN, —OH, —NR₁₃R₁₄, —NH₂, —O(C₃-C₇)cycloalkyl, —O-4- to 7-membered heterocycloalkyl ring comprising 1-3 heteroatoms selected from O, N, and S, —O(C₆-C₁₀)aryl, or —O-5- or 6-membered heteroaryl comprising 1-3 heteroatoms selected from O, N, and S, wherein the alkoxy is optionally substituted with one to three R₁₀ and the cycloalkyl, heterocycloalkyl, aryl, and heteroaryl are optionally substituted with one to three R₁₁; or
[1147] two R₈ together with the atoms to which they are attached form a (C₄-C₇)cycloalkyl or a 4- to 7-membered heterocycloalkyl ring comprising 1-2 heteroatoms selected from O, N, and S optionally substituted with two R₁₅; or two R₈ when on adjacent atoms together with the atoms to which they are attached form a (C₆-C₁₀)aryl, or 5- or 6-membered heteroaryl comprising 1-3 heteroatoms selected from O, N, and S; or two R₈ together with the same atom to which they are attached form a=(O);
[1148] each R₉ is independently at each occurrence (C₁-C₆)alkyl, (C₁-C₆)haloalkyl, (C₁-C₆)alkoxy, (C₁-C₆)haloalkoxy, halogen, (C₃-C₆)cycloalkyl, —OH, —CN, —NH₂, or —NR₁₃R₁₄; or
[1149] two R₉ together with the atoms to which they are attached form a (C₄-C₇)cycloalkyl or a 5- to 7-membered heterocycloalkyl ring comprising 1-2 heteroatoms selected from O, N, and S optionally substituted with one or more substituents each independently selected from (C₁-C₆)alkyl, (C₁-C₆)haloalkyl, halogen, —OH, —CN, and —NH₂; or two R₉ when on adjacent atoms together with the atoms to which they are attached form a (C₆-C₁₀)aryl, or 5- or 6-membered heteroaryl comprising 1-3 heteroatoms selected from O, N, and S;
[1150] each R₁₀ is independently at each occurrence selected from (C₃-C₇)cycloalkyl, 4- to 7-membered heterocycloalkyl ring comprising 1-3 heteroatoms selected from O, N, and S, (C₆-C₁₀)aryl, and 5- or 6-membered heteroaryl comprising 1-3 heteroatoms selected from O, N, and S;
[1151] each R₁₁ is independently at each occurrence selected from (C₁-C₆)alkyl, (C₁-C₆)haloalkyl, (C₁-C₆)alkoxy, (C₁-C₆)haloalkoxy, halogen, —OH, —CN, and —NH₂;
[1152] each R₁₂ is independently at each occurrence (C₁-C₆)alkyl, (C₁-C₆)haloalkyl, (C₁-C₆)alkoxy, (C₁-C₆)haloalkoxy, halogen, —OH, —CN, or —NH₂;
[1153] two R₁₂ together with the atoms to which they are attached form a (C₄-C₇)cycloalkyl or a 4- to 7-membered heterocycloalkyl ring comprising 1-2 heteroatoms selected from O, N, and S;
[1154] R₁₃ and R₁₄ are each independently selected from (C₁-C₆)alkyl, (C₁-C₆)haloalkyl, (C₃-C₇)cycloalkyl, 4- to 7-membered heterocycloalkyl ring comprising 1-3 heteroatoms selected from O, N, and S, (C₆-C₁₀)aryl, and 5- or 6-membered heteroaryl comprising 1-3 heteroatoms selected from O, N, and S;
[1155] two R₁₅ together with the atoms to which they are attached form a (C₄-C₇)cycloalkyl or a 4- to 7-membered heterocycloalkyl ring comprising 1-2 heteroatoms selected from O, N, and S;
[1156] m and m1 are each independently 0, 1 or 2;
[1157] n1 is 0, 1, 2, or 3; and
[1158] each s and n is independently 1, 2, or 3, wherein s+n is ≤4;
[1159] or a pharmaceutically acceptable salt, hydrate, solvate, prodrug, stereoisomer, and tautomer thereof.

[1160] In some embodiments, the compound has a Formula (I),

[chemical structure]

[1161] wherein:
[1162] Rₓ is H or D;
[1163] R¹ is

[chemical structure]

[1164] each R₂ is independently at each occurrence (C₁-C₆)alkyl, (C₁-C₆)alkoxy, (C₁-C₆)haloalkyl, (C₁-C₆)haloalkoxy, halogen, —CN, —OH, or —NH₂; or
[1165] two R₂ together with the carbon atoms to which they are attached form a (C₃-C₇)cycloalkyl or a 4- to 7-membered heterocycloalkyl ring comprising 1-3 heteroatoms selected from O, N, and S; or two R₂ together when on adjacent carbon atoms form a phenyl or a 5- or 6-membered heteroaryl ring comprising 1-3 heteroatoms selected from O, N, and S; or
[1166] R₂ and R₆ together with the carbon and nitrogen atoms to which they are attached form a 5- or 6-membered heterocycloalkyl ring optionally comprising 1-2 additional heteroatoms selected from O, N, and S, and optionally substituted with one to four substituents each independently selected from (C₁-C₆)alkyl, (C₁-C₆)haloalkyl, halogen, —OH, —CN, and —NH₂;
[1167] each R₃ is (C₁-C₆)alkyl, (C₁-C₆)alkoxy, (C₁-C₆)haloalkyl, (C₁-C₆)haloalkoxy, halogen, —OH, or —NH₂;
[1168] R₄ is —OR₅ or —NR₆R₆;
[1169] R₅ is H, (C₁-C₆)alkyl, (C₁-C₆)haloalkyl, (C₃-C₇)cycloalkyl, 5- or 6-membered heterocycloalkyl comprising 1-3 heteroatoms selected from O, N, and S, (C₆-C₁₀)aryl, or 5- or 6-membered heteroaryl comprising 1-3 heteroatoms selected from O, N, and S, wherein the alkyl is optionally substituted with one to three substituents independently selected from (C₆-C₁₀)aryl and 5- or 6-membered heteroaryl comprising 1-3 heteroatoms selected from O, N, and S;
[1170] R₆ and R₆, are each independently H, (C₁-C₆)alkyl, (C₁-C₆)haloalkyl, (C₃-C₇)cycloalkyl, 5- or 6-membered heterocycloalkyl comprising 1-3 heteroatoms selected from O, N, and S, (C₆-C₁₀)aryl, or 5- or 6-membered heteroaryl comprising 1-3 heteroatoms selected from O, N, and S, wherein the alkyl is optionally substituted with one to three R₇; or
[1171] R₆ and R₆, together with the nitrogen atom to which they are attached form a 4- to 7-membered heterocycloalkyl ring optionally comprising 1-2 additional heteroatoms selected from O, N, and S, and optionally substituted with one to four R₈; or
[1172] R₂ and R₆ together with the carbon and nitrogen atoms to which they are attached form a 5- or 6-membered heterocycloalkyl ring optionally comprising 1-2 additional heteroatoms selected from O, N, and S, and optionally substituted with one to four substituents each independently selected from (C₁-C₆)alkyl, (C₁-C₆)haloalkyl, halogen, —OH, —CN, and —NH₂;
[1173] each R₇ is (C₃-C₇)cycloalkyl, 4- to 7-membered heterocycloalkyl ring comprising 1-3 heteroatoms selected from O, N, and S, (C₆-C₁₀)aryl, or 5- or 6-membered heteroaryl comprising 1-3 heteroatoms selected from O, N, and S, wherein the cycloalkyl, heterocycloalkyl, aryl, and heteroaryl are optionally substituted with one to four R₉;
[1174] each R₈ is independently at each occurrence halogen, (C₁-C₆)alkyl, (C₁-C₆)alkoxy, (C₁-C₆)haloalkyl, (C₁-C₆)haloalkoxy, —CN, —OH, or —NH₂, wherein the alkoxy is optionally substituted with one to three substituents independently selected from (C₃-C₇)cycloalkyl, 4- to 7-membered heterocycloalkyl ring comprising 1-3 heteroatoms selected from O, N, and S, (C₆-C₁₀)aryl, and 5- or 6-membered heteroaryl comprising 1-3 heteroatoms selected from O, N, and S; or
[1175] two R₈ together with the atoms to which they are attached form a (C₅-C₇)cycloalkyl or a 4- to 7-membered heterocycloalkyl ring comprising 1-2 heteroatoms selected from O, N, and S;
[1176] each R₉ is independently at each occurrence (C₁-C₆)alkyl, (C₁-C₆)haloalkyl, halogen, —OH, —CN, or —NH₂; or
[1177] two R₉ together with the atoms to which they are attached form a (C₅-C₇)cycloalkyl or a 5- to 7-membered heterocycloalkyl ring comprising 1-2 heteroatoms selected from O, N, and S optionally substituted with one or more substituents each independently selected from (C₁-C₆)alkyl, (C₁-C₆)haloalkyl, halogen, —OH, —CN, and —NH₂;
[1178] m and m1 are each independently 0, 1, or 2;
[1179] n1 is 0, 1, 2, or 3; and
[1180] each s and n is independently 1, 2, or 3, wherein s+n is ≤4;
[1181] or a pharmaceutically acceptable salt, hydrate, solvate, prodrug, stereoisomer, and tautomer thereof.

[1182] In some embodiments, R₁ is

[chemical structure]

[1183] In some embodiments, n1 is 0, 1, or 2. In some embodiments, m1 is 0. In some embodiments, m1 is 2.

[1184] In some embodiments, R₁ is

[chemical structure]

In some embodiments, n is 2 and s is 1 or 2. In some embodiments, m is 0 or 1.

[1185] In some embodiments, the compound has a Formula (Ia) or Formula (Ib):

[chemical structure]

[1186] or a pharmaceutically acceptable salt, hydrate, solvate, prodrug, stereoisomer, and tautomer thereof.

[1187] In some embodiments, the compound has a Formula (Ic), Formula (Id), Formula (Ie), Formula (If), Formula (Ig), Formula (Ih), Formula (Ii), or Formula (Ij):

[chemical structure]

[1188] or a pharmaceutically acceptable salt, hydrate, solvate, prodrug, stereoisomer, and tautomer thereof.

[1189] In some embodiments, the compound has a Formula (Ik), Formula (Il), Formula (Im), Formula (In), Formula (Io), or Formula (Ip):

[chemical structure]

[1190] or a pharmaceutically acceptable salt, hydrate, solvate, prodrug, stereoisomer, and tautomer thereof.

[1191] In some embodiments, R₄ is —OR₅. In some embodiments, R₄ is —NR₆R₆.

[1192] In some embodiments, the compound has a Formula (Iq), Formula (Ir), Formula (Is), or Formula (It):

[chemical structure]

[1193] or a pharmaceutically acceptable salt, hydrate, solvate, prodrug, stereoisomer, and tautomer thereof.

[1194] In some embodiments, the compound is selected from:
[1195] 3-(5-(((1S,2S)-2-((2,2-difluoroethyl)(ethyl)amino)cyclopentyl)oxy)-1-oxoisoindolin-2-yl)piperidine-2,6-dione;
[1196] 3-(5-(((1S,2R)-2-((2,2-difluoroethyl)(ethyl)amino)cyclopentyl)oxy)-1-oxoisoindolin-2-yl)piperidine-2,6-dione;
[1197] 3-(5-(((1R,2S)-2-((2,2-difluoroethyl)(ethyl)amino)cyclopentyl)oxy)-1-oxoisoindolin-2-yl)piperidine-2,6-dione;
[1198] 3-(5-(((1R,2R)-2-((2,2-difluoroethyl)(ethyl)amino)cyclopentyl)oxy)-1-oxoisoindolin-2-yl)piperidine-2,6-dione;
[1199] 3-(5-((2-((2,2-difluoroethyl)(ethyl)amino)cyclopentyl)oxy)-1-oxoisoindolin-2-yl)piperidine-2,6-dione;
[1200] 3-(5-(((1S,2R)-2-(benzylamino)cyclohexyl)oxy)-1-oxoisoindolin-2-yl)piperidine-2,6-dione;
[1201] 3-(5-(((1S,2S)-2-(benzylamino)cyclohexyl)oxy)-1-oxoisoindolin-2-yl)piperidine-2,6-dione;
[1202] 3-(5-(((1R,2S)-2-(benzylamino)cyclohexyl)oxy)-1-oxoisoindolin-2-yl)piperidine-2,6-dione;
[1203] 3-(5-(((1R,2R)-2-(benzylamino)cyclohexyl)oxy)-1-oxoisoindolin-2-yl)piperidine-2,6-dione;
[1204] 3-(5-((2-(benzylamino)cyclohexyl)oxy)-1-oxoisoindolin-2-yl)piperidine-2,6-dione;
[1205] 3-(5-((1-methyloctahydrocyclopenta[b]pyrrol-6-yl)oxy)-1-oxoisoindolin-2-yl)piperidine-2,6-dione;
[1206] 3-(5-(((1S,2S)-2-methoxycyclohexyl)oxy)-1-oxoisoindolin-2-yl)piperidine-2,6-dione;
[1207] 3-(5-(((1S,2R)-2-methoxycyclohexyl)oxy)-1-oxoisoindolin-2-yl)piperidine-2,6-dione;
[1208] 3-(5-(((1R,2S)-2-methoxycyclohexyl)oxy)-1-oxoisoindolin-2-yl)piperidine-2,6-dione;
[1209] 3-(5-(((1R,2R)-2-methoxycyclohexyl)oxy)-1-oxoisoindolin-2-yl)piperidine-2,6-dione;
[1210] 3-(5-((2-methoxycyclohexyl)oxy)-1-oxoisoindolin-2-yl)piperidine-2,6-dione;
[1211] 3-(5-(((1S,2S)-2-(3-hydroxyazetidin-1-yl)cyclopentyl)oxy)-1-oxoisoindolin-2-yl)piperidine-2,6-dione;
[1212] 3-(5-(((1S,2R)-2-(3-hydroxyazetidin-1-yl)cyclopentyl)oxy)-1-oxoisoindolin-2-yl)piperidine-2,6-dione;
[1213] 3-(5-(((1R,2S)-2-(3-hydroxyazetidin-1-yl)cyclopentyl)oxy)-1-oxoisoindolin-2-yl)piperidine-2,6-dione;
[1214] 3-(5-(((1R,2R)-2-(3-hydroxyazetidin-1-yl)cyclopentyl)oxy)-1-oxoisoindolin-2-yl)piperidine-2,6-dione;
[1215] 3-(5-((2-(3-hydroxyazetidin-1-yl)cyclopentyl)oxy)-1-oxoisoindolin-2-yl)piperidine-2,6-dione;
[1216] 3-(5-(((1R,2R)-2-hydroxycyclopentyl)oxy)-1-oxoisoindolin-2-yl)piperidine-2,6-dione;
[1217] 3-(5-(((1R,2S)-2-hydroxycyclopentyl)oxy)-1-oxoisoindolin-2-yl)piperidine-2,6-dione;
[1218] 3-(5-(((1S,2R)-2-hydroxycyclopentyl)oxy)-1-oxoisoindolin-2-yl)piperidine-2,6-dione;
[1219] 3-(5-(((1S,2S)-2-hydroxycyclopentyl)oxy)-1-oxoisoindolin-2-yl)piperidine-2,6-dione;
[1220] 3-(5-((2-hydroxycyclopentyl)oxy)-1-oxoisoindolin-2-yl)piperidine-2,6-dione;
[1221] 3-(5-(((1S,2S)-2-(isobutylamino)cyclohexyl)oxy)-1-oxoisoindolin-2-yl)piperidine-2,6-dione;
[1222] 3-(5-(((1S,2R)-2-(isobutylamino)cyclohexyl)oxy)-1-oxoisoindolin-2-yl)piperidine-2,6-dione;
[1223] 3-(5-(((1R,2S)-2-(isobutylamino)cyclohexyl)oxy)-1-oxoisoindolin-2-yl)piperidine-2,6-dione;
[1224] 3-(5-(((1R,2R)-2-(isobutylamino)cyclohexyl)oxy)-1-oxoisoindolin-2-yl)piperidine-2,6-dione;
[1225] 3-(5-((2-(isobutylamino)cyclohexyl)oxy)-1-oxoisoindolin-2-yl)piperidine-2,6-dione;
[1226] 3-(5-(((1S,2S)-2-(4,4-difluoropiperidin-1-yl)cyclopentyl)oxy)-1-oxoisoindolin-2-yl)piperidine-2,6-dione;
[1227] 3-(5-(((1S,2S)-2-(4,4-difluoropiperidin-1-yl)cyclopentyl)oxy)-1-oxoisoindolin-2-yl)piperidine-2,6-dione;
[1228] 3-(5-(((1R,2R)-2-(4,4-difluoropiperidin-1-yl)cyclopentyl)oxy)-1-oxoisoindolin-2-yl)piperidine-2,6-dione;
[1229] 3-(5-(((1R,2S)-2-(4,4-difluoropiperidin-1-yl)cyclopentyl)oxy)-1-oxoisoindolin-2-yl)piperidine-2,6-dione;
[1230] 3-(5-((2-(4,4-difluoropiperidin-1-yl)cyclopentyl)oxy)-1-oxoisoindolin-2-yl)piperidine-2,6-dione;
[1231] 3-(5-(((1S,2S)-2-(benzyloxy)cyclopentyl)oxy)-1-oxoisoindolin-2-yl)piperidine-2,6-dione;
[1232] 3-(5-(((1S,2R)-2-(benzyloxy)cyclopentyl)oxy)-1-oxoisoindolin-2-yl)piperidine-2,6-dione;
[1233] 3-(5-(((1R,2R)-2-(benzyloxy)cyclopentyl)oxy)-1-oxoisoindolin-2-yl)piperidine-2,6-dione;
[1234] 3-(5-(((1R,2S)-2-(benzyloxy)cyclopentyl)oxy)-1-oxoisoindolin-2-yl)piperidine-2,6-dione;
[1235] 3-(5-((2-(benzyloxy)cyclopentyl)oxy)-1-oxoisoindolin-2-yl)piperidine-2,6-dione;
[1236] 3-(5-(((1S,2R)-2-(diethylamino)cyclopentyl)oxy)-1-oxoisoindolin-2-yl)piperidine-2,6-dione;
[1237] 3-(5-(((1S,2S)-2-(diethylamino)cyclopentyl)oxy)-1-oxoisoindolin-2-yl)piperidine-2,6-dione;
[1238] 3-(5-(((1R,2S)-2-(diethylamino)cyclopentyl)oxy)-1-oxoisoindolin-2-yl)piperidine-2,6-dione;
[1239] 3-(5-(((1R,2R)-2-(diethylamino)cyclopentyl)oxy)-1-oxoisoindolin-2-yl)piperidine-2,6-dione;
[1240] 3-(5-((2-(diethylamino)cyclopentyl)oxy)-1-oxoisoindolin-2-yl)piperidine-2,6-dione;
[1241] 3-(1-oxo-5-(((1S,2S)-2-(((1-(trifluoromethyl)cyclopropyl)methyl)amino)cyclohexyl)oxy) isoindolin-2-yl)piperidine-2,6-dione;
[1242] 3-(1-oxo-5-(((1R,2S)-2-(((1-(trifluoromethyl)cyclopropyl)methyl)amino)cyclohexyl)oxy) isoindolin-2-yl)piperidine-2,6-dione;
[1243] 3-(1-oxo-5-(((1R,2R)-2-(((1-(trifluoromethyl)cyclopropyl)methyl)amino)cyclohexyl)oxy) isoindolin-2-yl)piperidine-2,6-dione;
[1244] 3-(1-oxo-5-(((1S,2R)-2-(((1-(trifluoromethyl)cyclopropyl)methyl)amino)cyclohexyl)oxy) isoindolin-2-yl)piperidine-2,6-dione;
[1245] 3-(1-oxo-5-((2-(((1-(trifluoromethyl)cyclopropyl)methyl)amino)cyclohexyl)oxy)isoindolin-2-yl)piperidine-2,6-dione;
[1246] 3-(5-(((1S,2S)-2-aminocyclopentyl)oxy)-1-oxoisoindolin-2-yl)piperidine-2,6-dione;
[1247] 3-(5-(((1S,2R)-2-aminocyclopentyl)oxy)-1-oxoisoindolin-2-yl)piperidine-2,6-dione;
[1248] 3-(5-(((1R,2R)-2-aminocyclopentyl)oxy)-1-oxoisoindolin-2-yl)piperidine-2,6-dione;
[1249] 3-(5-(((1R,2S)-2-aminocyclopentyl)oxy)-1-oxoisoindolin-2-yl)piperidine-2,6-dione;
[1250] 3-(5-((2-aminocyclopentyl)oxy)-1-oxoisoindolin-2-yl)piperidine-2,6-dione;
[1251] 3-(5-(((1S,2S)-2-(diethylamino)cyclohexyl)oxy)-1-oxoisoindolin-2-yl)piperidine-2,6-dione;
[1252] 3-(5-(((1S,2R)-2-(diethylamino)cyclohexyl)oxy)-1-oxoisoindolin-2-yl)piperidine-2,6-dione;
[1253] 3-(5-(((1R,2R)-2-(diethylamino)cyclohexyl)oxy)-1-oxoisoindolin-2-yl)piperidine-2,6-dione;
[1254] 3-(5-(((1R,2S)-2-(diethylamino)cyclohexyl)oxy)-1-oxoisoindolin-2-yl)piperidine-2,6-dione;
[1255] 3-(5-((2-(diethylamino)cyclohexyl)oxy)-1-oxoisoindolin-2-yl)piperidine-2,6-dione;
[1256] 3-(5-(((1S,2S)-2-aminocyclohexyl)oxy)-1-oxoisoindolin-2-yl)piperidine-2,6-dione;
[1257] 3-(5-(((1S,2R)-2-aminocyclohexyl)oxy)-1-oxoisoindolin-2-yl)piperidine-2,6-dione;
[1258] 3-(5-(((1R,2R)-2-aminocyclohexyl)oxy)-1-oxoisoindolin-2-yl)piperidine-2,6-dione;
[1259] 3-(5-(((1R,2S)-2-aminocyclohexyl)oxy)-1-oxoisoindolin-2-yl)piperidine-2,6-dione;
[1260] 3-(5-((2-aminocyclohexyl)oxy)-1-oxoisoindolin-2-yl)piperidine-2,6-dione;
[1261] 3-(5-(((1S,2S)-2-(3-azabicyclo[3.2.1]octan-3-yl)cyclopentyl)oxy)-1-oxoisoindolin-2-yl)piperidine-2,6-dione;
[1262] 3-(5-(((1S,2R)-2-(3-azabicyclo[3.2.1]octan-3-yl)cyclopentyl)oxy)-1-oxoisoindolin-2-yl)piperidine-2,6-dione;
[1263] 3-(5-(((1R,2R)-2-(3-azabicyclo[3.2.1]octan-3-yl)cyclopentyl)oxy)-1-oxoisoindolin-2-yl)piperidine-2,6-dione;
[1264] 3-(5-(((1R,2S)-2-(3-azabicyclo[3.2.1]octan-3-yl)cyclopentyl)oxy)-1-oxoisoindolin-2-yl)piperidine-2,6-dione;
[1265] 3-(5-((2-(3-azabicyclo[3.2.1]octan-3-yl)cyclopentyl)oxy)-1-oxoisoindolin-2-yl)piperidine-2,6-dione;
[1266] 3-(5-(((1S,2S)-2-(1,4-dioxa-8-azaspiro[4.5]decan-8-yl)cyclopentyl)oxy)-1-oxoisoindolin-2-yl)piperidine-2,6-dione;
[1267] 3-(5-(((1S,2R)-2-(1,4-dioxa-8-azaspiro[4.5]decan-8-yl)cyclopentyl)oxy)-1-oxoisoindolin-2-yl)piperidine-2,6-dione;
[1268] 3-(5-(((1R,2R)-2-(1,4-dioxa-8-azaspiro[4.5]decan-8-yl)cyclopentyl)oxy)-1-oxoisoindolin-2-yl)piperidine-2,6-dione;
[1269] 3-(5-(((1R,2S)-2-(1,4-dioxa-8-azaspiro[4.5]decan-8-yl)cyclopentyl)oxy)-1-oxoisoindolin-2-yl)piperidine-2,6-dione;
[1270] 3-(5-((2-(1,4-dioxa-8-azaspiro[4.5]decan-8-yl)cyclopentyl)oxy)-1-oxoisoindolin-2-yl)piperidine-2,6-dione;
[1271] 3-(5-(((1S,2S)-2-(8-oxa-3-azabicyclo[3.2.1]octan-3-yl)cyclopentyl)oxy)-1-oxoisoindolin-2-yl)piperidine-2,6-dione;
[1272] 3-(5-(((1S,2R)-2-(8-oxa-3-azabicyclo[3.2.1]octan-3-yl)cyclopentyl)oxy)-1-oxoisoindolin-2-yl)piperidine-2,6-dione;
[1273] 3-(5-(((1R,2R)-2-(8-oxa-3-azabicyclo[3.2.1]octan-3-yl)cyclopentyl)oxy)-1-oxoisoindolin-2-yl)piperidine-2,6-dione;
[1274] 3-(5-(((1R,2S)-2-(8-oxa-3-azabicyclo[3.2.1]octan-3-yl)cyclopentyl)oxy)-1-oxoisoindolin-2-yl)piperidine-2,6-dione;
[1275] 3-(5-((2-(8-oxa-3-azabicyclo[3.2.1]octan-3-yl)cyclopentyl)oxy)-1-oxoisoindolin-2-yl)piperidine-2,6-dione;
[1276] 3-(1-oxo-5-(((1S,2S)-2-phenoxycyclohexyl)oxy)isoindolin-2-yl)piperidine-2,6-dione;
[1277] 3-(1-oxo-5-(((1S,2R)-2-phenoxycyclohexyl)oxy)isoindolin-2-yl)piperidine-2,6-dione;
[1278] 3-(1-oxo-5-(((1R,2R)-2-phenoxycyclohexyl)oxy)isoindolin-2-yl)piperidine-2,6-dione;
[1279] 3-(1-oxo-5-(((1R,2S)-2-phenoxycyclohexyl)oxy)isoindolin-2-yl)piperidine-2,6-dione;
[1280] 3-(1-oxo-5-((2-phenoxycyclohexyl)oxy)isoindolin-2-yl)piperidine-2,6-dione;
[1281] 3-(5-(((1S,2S)-2-(benzylamino)cyclopentyl)oxy)-1-oxoisoindolin-2-yl)piperidine-2,6-dione;
[1282] 3-(5-(((1S,2R)-2-(benzylamino)cyclopentyl)oxy)-1-oxoisoindolin-2-yl)piperidine-2,6-dione;
[1283] 3-(5-(((1R,2R)-2-(benzylamino)cyclopentyl)oxy)-1-oxoisoindolin-2-yl)piperidine-2,6-dione;
[1284] 3-(5-(((1R,2S)-2-(benzylamino)cyclopentyl)oxy)-1-oxoisoindolin-2-yl)piperidine-2,6-dione;
[1285] 3-(5-((2-(benzylamino)cyclopentyl)oxy)-1-oxoisoindolin-2-yl)piperidine-2,6-dione;
[1286] 3-(5-(((3S,4S)-3-(benzylamino)tetrahydro-2H-pyran-4-yl)oxy)-1-oxoisoindolin-2-yl)piperidine-2,6-dione;
[1287] 3-(5-(((3R,4S)-3-(benzylamino)tetrahydro-2H-pyran-4-yl)oxy)-1-oxoisoindolin-2-yl)piperidine-2,6-dione;
[1288] 3-(5-(((3R,4R)-3-(benzylamino)tetrahydro-2H-pyran-4-yl)oxy)-1-oxoisoindolin-2-yl)piperidine-2,6-dione;
[1289] 3-(5-(((3S,4R)-3-(benzylamino)tetrahydro-2H-pyran-4-yl)oxy)-1-oxoisoindolin-2-yl)piperidine-2,6-dione;
[1290] 3-(5-((3-(benzylamino)tetrahydro-2H-pyran-4-yl)oxy)-1-oxoisoindolin-2-yl)piperidine-2,6-dione;
[1291] 3-(5-(((1S,2S)-2-(benzylamino)cyclohexyl)oxy)-1-oxoisoindolin-2-yl)piperidine-2,6-dione;
[1292] 3-(5-(((1S,2R)-2-(benzylamino)cyclohexyl)oxy)-1-oxoisoindolin-2-yl)piperidine-2,6-dione;
[1293] 3-(5-(((1R,2R)-2-(benzylamino)cyclohexyl)oxy)-1-oxoisoindolin-2-yl)piperidine-2,6-dione;
[1294] 3-(5-(((1R,2S)-2-(benzylamino)cyclohexyl)oxy)-1-oxoisoindolin-2-yl)piperidine-2,6-dione;
[1295] 3-(5-((2-(benzylamino)cyclohexyl)oxy)-1-oxoisoindolin-2-yl)piperidine-2,6-dione;
[1296] 3-(1-oxo-5-(((1S,2S)-2-(((R)-1-phenylethyl)amino)cyclohexyl)oxy)isoindolin-2-yl)piperidine-2,6-dione;
[1297] 3-(1-oxo-5-(((1S,2R)-2-(((R)-1-phenylethyl)amino)cyclohexyl)oxy)isoindolin-2-yl)piperidine-2,6-dione;
[1298] 3-(1-oxo-5-(((1R,2R)-2-(((R)-1-phenylethyl)amino)cyclohexyl)oxy)isoindolin-2-yl)piperidine-2,6-dione;
[1299] 3-(1-oxo-5-(((1R,2S)-2-(((R)-1-phenylethyl)amino)cyclohexyl)oxy)isoindolin-2-yl)piperidine-2,6-dione;
[1300] 3-(1-oxo-5-((2-(((R)-1-phenylethyl)amino)cyclohexyl)oxy)isoindolin-2-yl)piperidine-2,6-dione;
[1301] 3-(5-(((1S,2S)-2-(ethyl(2-fluoroethyl)amino)cyclopentyl)oxy)-1-oxoisoindolin-2-yl)piperidine-2,6-dione;
[1302] 3-(5-(((1S,2R)-2-(ethyl(2-fluoroethyl)amino)cyclopentyl)oxy)-1-oxoisoindolin-2-yl)piperidine-2,6-dione;
[1303] 3-(5-(((1R,2R)-2-(ethyl(2-fluoroethyl)amino)cyclopentyl)oxy)-1-oxoisoindolin-2-yl)piperidine-2,6-dione;
[1304] 3-(5-(((1R,2S)-2-(ethyl(2-fluoroethyl)amino)cyclopentyl)oxy)-1-oxoisoindolin-2-yl)piperidine-2,6-dione;
[1305] 3-(5-((2-(ethyl(2-fluoroethyl)amino)cyclopentyl)oxy)-1-oxoisoindolin-2-yl)piperidine-2,6-dione;
[1306] 3-(5-(((1S,2S)-2-(ethyl(isopropyl)amino)cyclopentyl)oxy)-1-oxoisoindolin-2-yl)piperidine-2,6-dione;
[1307] 3-(5-(((1S,2R)-2-(ethyl(isopropyl)amino)cyclopentyl)oxy)-1-oxoisoindolin-2-yl)piperidine-2,6-dione;
[1308] 3-(5-(((1R,2R)-2-(ethyl(isopropyl)amino)cyclopentyl)oxy)-1-oxoisoindolin-2-yl)piperidine-2,6-dione;
[1309] 3-(5-(((1R,2S)-2-(ethyl(isopropyl)amino)cyclopentyl)oxy)-1-oxoisoindolin-2-yl)piperidine-2,6-dione;
[1310] 3-(5-((2-(ethyl(isopropyl)amino)cyclopentyl)oxy)-1-oxoisoindolin-2-yl)piperidine-2,6-dione;
[1311] 3-(5-(((1S,2S)-2-methoxycyclopentyl)oxy)-1-oxoisoindolin-2-yl)piperidine-2,6-dione;
[1312] 3-(5-(((1S,2R)-2-methoxycyclopentyl)oxy)-1-oxoisoindolin-2-yl)piperidine-2,6-dione;
[1313] 3-(5-(((1R,2R)-2-methoxycyclopentyl)oxy)-1-oxoisoindolin-2-yl)piperidine-2,6-dione;
[1314] 3-(5-(((1R,2S)-2-methoxycyclopentyl)oxy)-1-oxoisoindolin-2-yl)piperidine-2,6-dione;
[1315] 3-(5-((2-methoxycyclopentyl)oxy)-1-oxoisoindolin-2-yl)piperidine-2,6-dione;
[1316] 3-(5-(((1S,2S)-2-hydroxycyclohexyl)oxy)-1-oxoisoindolin-2-yl)piperidine-2,6-dione;
[1317] 3-(5-(((1S,2R)-2-hydroxycyclohexyl)oxy)-1-oxoisoindolin-2-yl)piperidine-2,6-dione;
[1318] 3-(5-(((1R,2R)-2-hydroxycyclohexyl)oxy)-1-oxoisoindolin-2-yl)piperidine-2,6-dione;
[1319] 3-(5-(((1R,2S)-2-hydroxycyclohexyl)oxy)-1-oxoisoindolin-2-yl)piperidine-2,6-dione;
[1320] 3-(5-((2-hydroxycyclohexyl)oxy)-1-oxoisoindolin-2-yl)piperidine-2,6-dione;
[1321] 3-(5-(((1S,2S)-2-(ethylamino)cyclopentyl)oxy)-1-oxoisoindolin-2-yl)piperidine-2,6-dione;
[1322] 3-(5-(((1S,2R)-2-(ethylamino)cyclopentyl)oxy)-1-oxoisoindolin-2-yl)piperidine-2,6-dione;
[1323] 3-(5-(((1R,2R)-2-(ethylamino)cyclopentyl)oxy)-1-oxoisoindolin-2-yl)piperidine-2,6-dione;
[1324] 3-(5-(((1R,2S)-2-(ethylamino)cyclopentyl)oxy)-1-oxoisoindolin-2-yl)piperidine-2,6-dione;
[1325] 3-(5-((2-(ethylamino)cyclopentyl)oxy)-1-oxoisoindolin-2-yl)piperidine-2,6-dione;
[1326] 3-(5-(((1S,2S)-2-(bis(cyclopropylmethyl)amino)cyclopentyl)oxy)-1-oxoisoindolin-2-yl)piperidine-2,6-dione;
[1327] 3-(5-(((1R,2S)-2-(bis(cyclopropylmethyl)amino)cyclopentyl)oxy)-1-oxoisoindolin-2-yl)piperidine-2,6-dione;
[1328] 3-(5-(((1R,2R)-2-(bis(cyclopropylmethyl)amino)cyclopentyl)oxy)-1-oxoisoindolin-2-yl)piperidine-2,6-dione;
[1329] 3-(5-(((1S,2R)-2-(bis(cyclopropylmethyl)amino)cyclopentyl)oxy)-1-oxoisoindolin-2-yl)piperidine-2,6-dione;
[1330] 3-(5-((2-(bis(cyclopropylmethyl)amino)cyclopentyl)oxy)-1-oxoisoindolin-2-yl)piperidine-2,6-dione;
[1331] 3-(1-oxo-5-(((1S,2S)-2-(piperidin-1-yl)cyclopentyl)oxy)isoindolin-2-yl)piperidine-2,6-dione;
[1332] 3-(1-oxo-5-(((1S,2R)-2-(piperidin-1-yl)cyclopentyl)oxy)isoindolin-2-yl)piperidine-2,6-dione;
[1333] 3-(1-oxo-5-(((1R,2R)-2-(piperidin-1-yl)cyclopentyl)oxy)isoindolin-2-yl)piperidine-2,6-dione;
[1334] 3-(1-oxo-5-(((1R,2S)-2-(piperidin-1-yl)cyclopentyl)oxy)isoindolin-2-yl)piperidine-2,6-dione;
[1335] 3-(1-oxo-5-((2-(piperidin-1-yl)cyclopentyl)oxy)isoindolin-2-yl)piperidine-2,6-dione;
[1336] 3-(5-(((1S,2S)-2-morpholinocyclopentyl)oxy)-1-oxoisoindolin-2-yl)piperidine-2,6-dione;
[1337] 3-(5-(((1S,2R)-2-morpholinocyclopentyl)oxy)-1-oxoisoindolin-2-yl)piperidine-2,6-dione;
[1338] 3-(5-(((1R,2R)-2-morpholinocyclopentyl)oxy)-1-oxoisoindolin-2-yl)piperidine-2,6-dione;
[1339] 3-(5-(((1R,2S)-2-morpholinocyclopentyl)oxy)-1-oxoisoindolin-2-yl)piperidine-2,6-dione;
[1340] 3-(5-((2-morpholinocyclopentyl)oxy)-1-oxoisoindolin-2-yl)piperidine-2,6-dione;
[1341] 3-(5-(((1S,2S)-2-(dibenzylamino)cyclohexyl)oxy)-1-oxoisoindolin-2-yl)piperidine-2,6-dione;
[1342] 3-(5-(((1S,2R)-2-(dibenzylamino)cyclohexyl)oxy)-1-oxoisoindolin-2-yl)piperidine-2,6-dione;
[1343] 3-(5-(((1R,2R)-2-(dibenzylamino)cyclohexyl)oxy)-1-oxoisoindolin-2-yl)piperidine-2,6-dione;
[1344] 3-(5-(((1R,2S)-2-(dibenzylamino)cyclohexyl)oxy)-1-oxoisoindolin-2-yl)piperidine-2,6-dione;
[1345] 3-(5-((2-(dibenzylamino)cyclohexyl)oxy)-1-oxoisoindolin-2-yl)piperidine-2,6-dione; cis-3-(5-((2-(diethylamino)cyclohexyl)oxy)-1-oxoisoindolin-2-yl)piperidine-2,6-dione; trans-3-(5-((2-(diethylamino)cyclohexyl)oxy)-1-oxoisoindolin-2-yl)piperidine-2,6-dione;
[1346] 3-(5-(((1S,2S)-2-(methylamino)cyclohexyl)oxy)-1-oxoisoindolin-2-yl)piperidine-2,6-dione;
[1347] 3-(5-(((1S,2R)-2-(methylamino)cyclohexyl)oxy)-1-oxoisoindolin-2-yl)piperidine-2,6-dione;
[1348] 3-(5-(((1R,2R)-2-(methylamino)cyclohexyl)oxy)-1-oxoisoindolin-2-yl)piperidine-2,6-dione;
[1349] 3-(5-(((1R,2S)-2-(methylamino)cyclohexyl)oxy)-1-oxoisoindolin-2-yl)piperidine-2,6-dione;
[1350] 3-(5-((2-(methylamino)cyclohexyl)oxy)-1-oxoisoindolin-2-yl)piperidine-2,6-dione;
[1351] 1-((1S,2S)-2-((2-(2,6-dioxopiperidin-3-yl)-1-oxoisoindolin-5-yl)oxy)cyclopentyl)-4-methylpiperidine-4-carbonitrile;
[1352] 1-((1R,2S)-2-((2-(2,6-dioxopiperidin-3-yl)-1-oxoisoindolin-5-yl)oxy)cyclopentyl)-4-methylpiperidine-4-carbonitrile;
[1353] 1-((1R,2R)-2-((2-(2,6-dioxopiperidin-3-yl)-1-oxoisoindolin-5-yl)oxy)cyclopentyl)-4-methylpiperidine-4-carbonitrile;
[1354] 1-((1S,2R)-2-((2-(2,6-dioxopiperidin-3-yl)-1-oxoisoindolin-5-yl)oxy)cyclopentyl)-4-methylpiperidine-4-carbonitrile;
[1355] 1-(2-((2-(2,6-dioxopiperidin-3-yl)-1-oxoisoindolin-5-yl)oxy)cyclopentyl)-4-methylpiperidine-4-carbonitrile;
[1356] 3-(5-(((1S,2S)-2-(benzyl(methyl)amino)cyclohexyl)oxy)-1-oxoisoindolin-2-yl)piperidine-2,6-dione;
[1357] 3-(5-(((1S,2R)-2-(benzyl(methyl)amino)cyclohexyl)oxy)-1-oxoisoindolin-2-yl)piperidine-2,6-dione;
[1358] 3-(5-(((1R,2R)-2-(benzyl(methyl)amino)cyclohexyl)oxy)-1-oxoisoindolin-2-yl)piperidine-2,6-dione;
[1359] 3-(5-(((1R,2S)-2-(benzyl(methyl)amino)cyclohexyl)oxy)-1-oxoisoindolin-2-yl)piperidine-2,6-dione;
[1360] 3-(5-((2-(benzyl(methyl)amino)cyclohexyl)oxy)-1-oxoisoindolin-2-yl)piperidine-2,6-dione;
[1361] 3-(5-(((3S,4S)-3-aminotetrahydro-2H-pyran-4-yl)oxy)-1-oxoisoindolin-2-yl)piperidine-2,6-dione;
[1362] 3-(5-(((3R,4S)-3-aminotetrahydro-2H-pyran-4-yl)oxy)-1-oxoisoindolin-2-yl)piperidine-2,6-dione;
[1363] 3-(5-(((3R,4R)-3-aminotetrahydro-2H-pyran-4-yl)oxy)-1-oxoisoindolin-2-yl)piperidine-2,6-dione;
[1364] 3-(5-(((3S,4R)-3-aminotetrahydro-2H-pyran-4-yl)oxy)-1-oxoisoindolin-2-yl)piperidine-2,6-dione;
[1365] 3-(5-((3-aminotetrahydro-2H-pyran-4-yl)oxy)-1-oxoisoindolin-2-yl)piperidine-2,6-dione;
[1366] 3-(5-((1S,2S)-2-(benzylamino)cyclobutoxy)-1-oxoisoindolin-2-yl)piperidine-2,6-dione;
[1367] 3-(5-((1R,2R)-2-(benzylamino)cyclobutoxy)-1-oxoisoindolin-2-yl)piperidine-2,6-dione;
[1368] 3-(5-((1S,2R)-2-(benzylamino)cyclobutoxy)-1-oxoisoindolin-2-yl)piperidine-2,6-dione;
[1369] 3-(5-((1R,2S)-2-(benzylamino)cyclobutoxy)-1-oxoisoindolin-2-yl)piperidine-2,6-dione;
[1370] 3-(5-(2-(benzylamino)cyclobutoxy)-1-oxoisoindolin-2-yl)piperidine-2,6-dione;
[1371] 3-(5-(((3R,4S)-4-aminotetrahydrofuran-3-yl)oxy)-1-oxoisoindolin-2-yl)piperidine-2,6-dione;
[1372] 3-(5-(((3R,4R)-4-aminotetrahydrofuran-3-yl)oxy)-1-oxoisoindolin-2-yl)piperidine-2,6-dione;
[1373] 3-(5-(((3S,4R)-4-aminotetrahydrofuran-3-yl)oxy)-1-oxoisoindolin-2-yl)piperidine-2,6-dione;
[1374] 3-(5-(((3S,4S)-4-aminotetrahydrofuran-3-yl)oxy)-1-oxoisoindolin-2-yl)piperidine-2,6-dione;
[1375] 3-(5-((4-aminotetrahydrofuran-3-yl)oxy)-1-oxoisoindolin-2-yl)piperidine-2,6-dione;
[1376] 3-(5-(((3R,4S)-4-(diethylamino)tetrahydrofuran-3-yl)oxy)-1-oxoisoindolin-2-yl)piperidine-2,6-dione;
[1377] 3-(5-(((3R,4R)-4-(diethylamino)tetrahydrofuran-3-yl)oxy)-1-oxoisoindolin-2-yl)piperidine-2,6-dione;
[1378] 3-(5-(((3S,4R)-4-(diethylamino)tetrahydrofuran-3-yl)oxy)-1-oxoisoindolin-2-yl)piperidine-2,6-dione;
[1379] 3-(5-(((3S,4S)-4-(diethylamino)tetrahydrofuran-3-yl)oxy)-1-oxoisoindolin-2-yl)piperidine-2,6-dione;
[1380] 3-(5-((4-(diethylamino)tetrahydrofuran-3-yl)oxy)-1-oxoisoindolin-2-yl)piperidine-2,6-dione;
[1381] 3-(5-(((1S,2S)-2-(ethylamino)cyclohexyl)oxy)-1-oxoisoindolin-2-yl)piperidine-2,6-dione;
[1382] 3-(5-(((1S,2R)-2-(ethylamino)cyclohexyl)oxy)-1-oxoisoindolin-2-yl)piperidine-2,6-dione;
[1383] 3-(5-(((1R,2R)-2-(ethylamino)cyclohexyl)oxy)-1-oxoisoindolin-2-yl)piperidine-2,6-dione;
[1384] 3-(5-(((1R,2S)-2-(ethylamino)cyclohexyl)oxy)-1-oxoisoindolin-2-yl)piperidine-2,6-dione;
[1385] 3-(5-((2-(ethylamino)cyclohexyl)oxy)-1-oxoisoindolin-2-yl)piperidine-2,6-dione;
[1386] 4-((((1S,2S)-2-((2-(2,6-dioxopiperidin-3-yl)-1-oxoisoindolin-5-yl)oxy)cyclohexyl)amino) methyl)benzonitrile;
[1387] 4-((((1R,2S)-2-((2-(2,6-dioxopiperidin-3-yl)-1-oxoisoindolin-5-yl)oxy)cyclohexyl)amino)methyl)benzonitrile;
[1388] 4-((((1R,2R)-2-((2-(2,6-dioxopiperidin-3-yl)-1-oxoisoindolin-5-yl)oxy)cyclohexyl)amino)methyl)benzonitrile;
[1389] 4-((((1S,2R)-2-((2-(2,6-dioxopiperidin-3-yl)-1-oxoisoindolin-5-yl)oxy)cyclohexyl)amino)methyl)benzonitrile;
[1390] 4-(((2-((2-(2,6-dioxopiperidin-3-yl)-1-oxoisoindolin-5-yl)oxy)cyclohexyl)amino)methyl)benzonitrile;
[1391] 3-(5-((1S,2S)-2-(diethylamino)cyclobutoxy)-1-oxoisoindolin-2-yl)piperidine-2,6-dione;
[1392] 3-(5-((1R,2S)-2-(diethylamino)cyclobutoxy)-1-oxoisoindolin-2-yl)piperidine-2,6-dione;
[1393] 3-(5-((1R,2R)-2-(diethylamino)cyclobutoxy)-1-oxoisoindolin-2-yl)piperidine-2,6-dione;
[1394] 3-(5-((1S,2R)-2-(diethylamino)cyclobutoxy)-1-oxoisoindolin-2-yl)piperidine-2,6-dione;
[1395] 3-(5-(2-(diethylamino)cyclobutoxy)-1-oxoisoindolin-2-yl)piperidine-2,6-dione;
[1396] 3-(5-(((1S,2S)-2-(ethyl((3-fluorobicyclo[1.1.1]pentan-1-yl)methyl)amino)cyclopentyl)oxy)-1-oxoisoindolin-2-yl)piperidine-2,6-dione;
[1397] 3-(5-(((1S,2R)-2-(ethyl((3-fluorobicyclo[1.1.1]pentan-1-yl)methyl)amino)cyclopentyl)oxy)-1-oxoisoindolin-2-yl)piperidine-2,6-dione;
[1398] 3-(5-(((1R,2R)-2-(ethyl((3-fluorobicyclo[1.1.1]pentan-1-yl)methyl)amino)cyclopentyl)oxy)-1-oxoisoindolin-2-yl)piperidine-2,6-dione;
[1399] 3-(5-(((1R,2S)-2-(ethyl((3-fluorobicyclo[1.1.1]pentan-1-yl)methyl)amino)cyclopentyl)oxy)-1-oxoisoindolin-2-yl)piperidine-2,6-dione;
[1400] 3-(5-((2-(ethyl((3-fluorobicyclo[1.1.1]pentan-1-yl)methyl)amino)cyclopentyl)oxy)-1-oxoisoindolin-2-yl)piperidine-2,6-dione;
[1401] 3-((((1S,2S)-2-((2-(2,6-dioxopiperidin-3-yl)-1-oxoisoindolin-5-yl)oxy)cyclohexyl)amino)methyl)benzonitrile;
[1402] 3-((((1R,2S)-2-((2-(2,6-dioxopiperidin-3-yl)-1-oxoisoindolin-5-yl)oxy)cyclohexyl)amino)methyl)benzonitrile;
[1403] 3-((((1R,2R)-2-((2-(2,6-dioxopiperidin-3-yl)-1-oxoisoindolin-5-yl)oxy)cyclohexyl)amino)methyl)benzonitrile;
[1404] 3-((((1S,2R)-2-((2-(2,6-dioxopiperidin-3-yl)-1-oxoisoindolin-5-yl)oxy)cyclohexyl)amino)methyl)benzonitrile;
[1405] 3-(((2-((2-(2,6-dioxopiperidin-3-yl)-1-oxoisoindolin-5-yl)oxy)cyclohexyl)amino)methyl)benzonitrile;
[1406] 3-(5-(((1S,2S)-2-(isopropylamino)cyclohexyl)oxy)-1-oxoisoindolin-2-yl)piperidine-2,6-dione;
[1407] 3-(5-(((1S,2R)-2-(isopropylamino)cyclohexyl)oxy)-1-oxoisoindolin-2-yl)piperidine-2,6-dione;
[1408] 3-(5-(((1R,2S)-2-(isopropylamino)cyclohexyl)oxy)-1-oxoisoindolin-2-yl)piperidine-2,6-dione;
[1409] 3-(5-(((1R,2R)-2-(isopropylamino)cyclohexyl)oxy)-1-oxoisoindolin-2-yl)piperidine-2,6-dione;
[1410] 3-(5-((2-(isopropylamino)cyclohexyl)oxy)-1-oxoisoindolin-2-yl)piperidine-2,6-dione;
[1411] 2-((((1S,2S)-2-((2-(2,6-dioxopiperidin-3-yl)-1-oxoisoindolin-5-yl)oxy)cyclohexyl)amino)methyl)benzonitrile;
[1412] 2-((((1R,2S)-2-((2-(2,6-dioxopiperidin-3-yl)-1-oxoisoindolin-5-yl)oxy)cyclohexyl)amino)methyl)benzonitrile;
[1413] 2-((((1R,2R)-2-((2-(2,6-dioxopiperidin-3-yl)-1-oxoisoindolin-5-yl)oxy)cyclohexyl)amino)methyl)benzonitrile;
[1414] 2-((((1S,2R)-2-((2-(2,6-dioxopiperidin-3-yl)-1-oxoisoindolin-5-yl)oxy)cyclohexyl)amino)methyl)benzonitrile;
[1415] 2-(((2-((2-(2,6-dioxopiperidin-3-yl)-1-oxoisoindolin-5-yl)oxy)cyclohexyl)amino)methyl)benzonitrile;
[1416] 3-(5-(((1S,2S)-2-(((3-fluorobicyclo[1.1.1]pentan-1-yl)methyl)amino)cyclohexyl)oxy)-1-oxoisoindolin-2-yl)piperidine-2,6-dione;
[1417] 3-(5-(((1R,2S)-2-(((3-fluorobicyclo[1.1.1]pentan-1-yl)methyl)amino)cyclohexyl)oxy)-1-oxoisoindolin-2-yl)piperidine-2,6-dione;
[1418] 3-(5-(((1R,2R)-2-(((3-fluorobicyclo[1.1.1]pentan-1-yl)methyl)amino)cyclohexyl)oxy)-1-oxoisoindolin-2-yl)piperidine-2,6-dione;
[1419] 3-(5-(((1S,2R)-2-(((3-fluorobicyclo[1.1.1]pentan-1-yl)methyl)amino)cyclohexyl)oxy)-1-oxoisoindolin-2-yl)piperidine-2,6-dione;
[1420] 3-(5-((2-(((3-fluorobicyclo[1.1.1]pentan-1-yl)methyl)amino)cyclohexyl)oxy)-1-oxoisoindolin-2-yl)piperidine-2,6-dione;
[1421] 3-(5-(((1S,2S)-2-(4-hydroxy-4-methylpiperidin-1-yl)cyclopentyl)oxy)-1-oxoisoindolin-2-yl)piperidine-2,6-dione;
[1422] 3-(5-(((1S,2R)-2-(4-hydroxy-4-methylpiperidin-1-yl)cyclopentyl)oxy)-1-oxoisoindolin-2-yl)piperidine-2,6-dione;
[1423] 3-(5-(((1R,2R)-2-(4-hydroxy-4-methylpiperidin-1-yl)cyclopentyl)oxy)-1-oxoisoindolin-2-yl)piperidine-2,6-dione;
[1424] 3-(5-(((1R,2S)-2-(4-hydroxy-4-methylpiperidin-1-yl)cyclopentyl)oxy)-1-oxoisoindolin-2-yl)piperidine-2,6-dione;
[1425] 3-(5-((2-(4-hydroxy-4-methylpiperidin-1-yl)cyclopentyl)oxy)-1-oxoisoindolin-2-yl)piperidine-2,6-dione;
[1426] 3-(5-(((1S,2S)-2-(4-hydroxy-4-(trifluoromethyl)piperidin-1-yl)cyclopentyl)oxy)-1-oxoisoindolin-2-yl)piperidine-2,6-dione;
[1427] 3-(5-(((1S,2R)-2-(4-hydroxy-4-(trifluoromethyl)piperidin-1-yl)cyclopentyl)oxy)-1-oxoisoindolin-2-yl)piperidine-2,6-dione;
[1428] 3-(5-(((1R,2R)-2-(4-hydroxy-4-(trifluoromethyl)piperidin-1-yl)cyclopentyl)oxy)-1-oxoisoindolin-2-yl)piperidine-2,6-dione;
[1429] 3-(5-(((1R,2S)-2-(4-hydroxy-4-(trifluoromethyl)piperidin-1-yl)cyclopentyl)oxy)-1-oxoisoindolin-2-yl)piperidine-2,6-dione;
[1430] 3-(5-((2-(4-hydroxy-4-(trifluoromethyl)piperidin-1-yl)cyclopentyl)oxy)-1-oxoisoindolin-2-yl)piperidine-2,6-dione;
[1431] 1-((1S,2S)-2-((2-(2,6-dioxopiperidin-3-yl)-1-oxoisoindolin-5-yl)oxy)cyclopentyl)-4-(trifluoromethyl)piperidine-4-carbonitrile;
[1432] 1-((1R,2S)-2-((2-(2,6-dioxopiperidin-3-yl)-1-oxoisoindolin-5-yl)oxy)cyclopentyl)-4-(trifluoromethyl)piperidine-4-carbonitrile;
[1433] 1-((1R,2R)-2-((2-(2,6-dioxopiperidin-3-yl)-1-oxoisoindolin-5-yl)oxy)cyclopentyl)-4-(trifluoromethyl)piperidine-4-carbonitrile;
[1434] 1-((1S,2R)-2-((2-(2,6-dioxopiperidin-3-yl)-1-oxoisoindolin-5-yl)oxy)cyclopentyl)-4-(trifluoromethyl)piperidine-4-carbonitrile;
[1435] 1-(2-((2-(2,6-dioxopiperidin-3-yl)-1-oxoisoindolin-5-yl)oxy)cyclopentyl)-4-(trifluoromethyl)piperidine-4-carbonitrile;
[1436] 3-(5-(((1S,2S)-2-(2-oxa-7-azaspiro[3.5]nonan-7-yl)cyclopentyl)oxy)-1-oxoisoindolin-2-yl)piperidine-2,6-dione;
[1437] 3-(5-(((1S,2R)-2-(2-oxa-7-azaspiro[3.5]nonan-7-yl)cyclopentyl)oxy)-1-oxoisoindolin-2-yl)piperidine-2,6-dione;
[1438] 3-(5-(((1R,2R)-2-(2-oxa-7-azaspiro[3.5]nonan-7-yl)cyclopentyl)oxy)-1-oxoisoindolin-2-yl)piperidine-2,6-dione;
[1439] 3-(5-(((1R,2S)-2-(2-oxa-7-azaspiro[3.5]nonan-7-yl)cyclopentyl)oxy)-1-oxoisoindolin-2-yl)piperidine-2,6-dione;
[1440] 3-(5-((2-(2-oxa-7-azaspiro[3.5]nonan-7-yl)cyclopentyl)oxy)-1-oxoisoindolin-2-yl)piperidine-2,6-dione;
[1441] 3-(1-oxo-5-(((1S,2S)-2-(3-(2,2,2-trifluoroethoxy)azetidin-1-yl)cyclohexyl)oxy)isoindolin-2-yl)piperidine-2,6-dione;
[1442] 3-(1-oxo-5-(((1R,2S)-2-(3-(2,2,2-trifluoroethoxy)azetidin-1-yl)cyclohexyl)oxy)isoindolin-2-yl)piperidine-2,6-dione;
[1443] 3-(1-oxo-5-(((1S,2R)-2-(3-(2,2,2-trifluoroethoxy)azetidin-1-yl)cyclohexyl)oxy)isoindolin-2-yl)piperidine-2,6-dione;
[1444] 3-(1-oxo-5-(((1R,2R)-2-(3-(2,2,2-trifluoroethoxy)azetidin-1-yl)cyclohexyl)oxy)isoindolin-2--yl)piperidine-2,6-dione; 3-(1-oxo-5-((2-(3-(2,2,2-trifluoroethoxy)azetidin-1-yl)cyclohexyl)oxy)isoindolin-2-yl)piperidine-2,6-dione;
[1445] 3-(5-(((1S,2S)-2-(3-(2,2-difluoroethoxy)azetidin-1-yl)cyclohexyl)oxy)-1-oxoisoindolin-2-yl)piperidine-2,6-dione;
[1446] 3-(5-(((1R,2S)-2-(3-(2,2-difluoroethoxy)azetidin-1-yl)cyclohexyl)oxy)-1-oxoisoindolin-2-yl)piperidine-2,6-dione;
[1447] 3-(5-(((1S,2R)-2-(3-(2,2-difluoroethoxy)azetidin-1-yl)cyclohexyl)oxy)-1-oxoisoindolin-2-yl)piperidine-2,6-dione;
[1448] 3-(5-(((1R,2R)-2-(3-(2,2-difluoroethoxy)azetidin-1-yl)cyclohexyl)oxy)-1-oxoisoindolin-2-yl)piperidine-2,6-dione;
[1449] 3-(5-((2-(3-(2,2-difluoroethoxy)azetidin-1-yl)cyclohexyl)oxy)-1-oxoisoindolin-2-yl)piperidine-2,6-dione;
[1450] 3-(5-(((1S,2S)-2-(3-(cyclopropylmethoxy)azetidin-1-yl)cyclohexyl)oxy)-1-oxoisoindolin-2-yl)piperidine-2,6-dione;
[1451] 3-(5-(((1R,2S)-2-(3-(cyclopropylmethoxy)azetidin-1-yl)cyclohexyl)oxy)-1-oxoisoindolin-2-yl)piperidine-2,6-dione;
[1452] 3-(5-(((1S,2R)-2-(3-(cyclopropylmethoxy)azetidin-1-yl)cyclohexyl)oxy)-1-oxoisoindolin-2-yl)piperidine-2,6-dione;
[1453] 3-(5-(((1R,2R)-2-(3-(cyclopropylmethoxy)azetidin-1-yl)cyclohexyl)oxy)-1-oxoisoindolin-2-yl)piperidine-2,6-dione;
[1454] 3-(5-((2-(3-(cyclopropylmethoxy)azetidin-1-yl)cyclohexyl)oxy)-1-oxoisoindolin-2-yl)piperidine-2,6-dione;
[1455] 3-(5-(((1S,2S)-2-(3-(benzyloxy)azetidin-1-yl)cyclopentyl)oxy)-1-oxoisoindolin-2-yl)piperidine-2,6-dione;
[1456] 3-(5-(((1R,2S)-2-(3-(benzyloxy)azetidin-1-yl)cyclopentyl)oxy)-1-oxoisoindolin-2-yl)piperidine-2,6-dione;
[1457] 3-(5-(((1S,2R)-2-(3-(benzyloxy)azetidin-1-yl)cyclopentyl)oxy)-1-oxoisoindolin-2-yl)piperidine-2,6-dione;
[1458] 3-(5-(((1R,2R)-2-(3-(benzyloxy)azetidin-1-yl)cyclopentyl)oxy)-1-oxoisoindolin-2-yl)piperidine-2,6-dione;
[1459] 3-(5-((2-(3-(benzyloxy)azetidin-1-yl)cyclopentyl)oxy)-1-oxoisoindolin-2-yl)piperidine-2,6-dione;
[1460] 3-(5-(((1S,2S)-2-(3-isopropoxyazetidin-1-yl)cyclohexyl)oxy)-1-oxoisoindolin-2-yl)piperidine-2,6-dione;
[1461] 3-(5-(((1R,2S)-2-(3-isopropoxyazetidin-1-yl)cyclohexyl)oxy)-1-oxoisoindolin-2--yl)piperidine-2,6-dione;
[1462] 3-(5-(((1S,2R)-2-(3-isopropoxyazetidin-1-yl)cyclohexyl)oxy)-1-oxoisoindolin-2-yl)piperidine-2,6-dione;
[1463] 3-(5-(((1R,2R)-2-(3-isopropoxyazetidin-1-yl)cyclohexyl)oxy)-1-oxoisoindolin-2-yl)piperidine-2,6-dione;
[1464] 3-(5-((2-(3-isopropoxyazetidin-1-yl)cyclohexyl)oxy)-1-oxoisoindolin-2-yl)piperidine-2,6-dione;
[1465] 3-(5-(((1R,2R)-2-(3-ethoxyazetidin-1-yl)cyclohexyl)oxy)-1-oxoisoindolin-2-yl)piperidine-2,6-dione;
[1466] 3-(5-(((1R,2S)-2-(3-ethoxyazetidin-1-yl)cyclohexyl)oxy)-1-oxoisoindolin-2-yl)piperidine-2,6-dione;
[1467] 3-(5-(((1S,2R)-2-(3-ethoxyazetidin-1-yl)cyclohexyl)oxy)-1-oxoisoindolin-2-yl)piperidine-2,6-dione;
[1468] 3-(5-(((1S,2S)-2-(3-ethoxyazetidin-1-yl)cyclohexyl)oxy)-1-oxoisoindolin-2-yl)piperidine-2,6-dione;
[1469] 3-(5-((2-(3-ethoxyazetidin-1-yl)cyclohexyl)oxy)-1-oxoisoindolin-2-yl)piperidine-2,6-dione;
[1470] 3-(5-(((1S,2S)-2-(3-(benzyloxy)azetidin-1-yl)cyclohexyl)oxy)-1-oxoisoindolin-2-yl)piperidine-2,6-dione;
[1471] 3-(5-(((1R,2S)-2-(3-(benzyloxy)azetidin-1-yl)cyclohexyl)oxy)-1-oxoisoindolin-2-yl)piperidine-2,6-dione;
[1472] 3-(5-(((1S,2R)-2-(3-(benzyloxy)azetidin-1-yl)cyclohexyl)oxy)-1-oxoisoindolin-2-yl)piperidine-2,6-dione;
[1473] 3-(5-(((1R,2R)-2-(3-(benzyloxy)azetidin-1-yl)cyclohexyl)oxy)-1-oxoisoindolin-2-yl)piperidine-2,6-dione;
[1474] 3-(5-((2-(3-(benzyloxy)azetidin-1-yl)cyclohexyl)oxy)-1-oxoisoindolin-2-yl)piperidine-2,6-dione;
[1475] 3-(5-(((1S,2S)-2-(3-ethoxyazetidin-1-yl)cycloheptyl)oxy)-1-oxoisoindolin-2-yl)piperidine-2,6-dione;
[1476] 3-(5-(((1R,2S)-2-(3-ethoxyazetidin-1-yl)cycloheptyl)oxy)-1-oxoisoindolin-2-yl)piperidine-2,6-dione;
[1477] 3-(5-(((1S,2R)-2-(3-ethoxyazetidin-1-yl)cycloheptyl)oxy)-1-oxoisoindolin-2-yl)piperidine-2,6-dione;
[1478] 3-(5-(((1R,2R)-2-(3-ethoxyazetidin-1-yl)cycloheptyl)oxy)-1-oxoisoindolin-2-yl)piperidine-2,6-dione;
[1479] 3-(5-((2-(3-ethoxyazetidin-1-yl)cycloheptyl)oxy)-1-oxoisoindolin-2-yl)piperidine-2,6-dione;
[1480] 3-(5-(((1S,2S)-2-(3-(3,3-difluorocyclobutoxy)azetidin-1-yl)cyclohexyl)oxy)-1-oxoisoindolin-2-yl)piperidine-2,6-dione;
[1481] 3-(5-(((1R,2S)-2-(3-(3,3-difluorocyclobutoxy)azetidin-1-yl)cyclohexyl)oxy)-1-oxoisoindolin-2-yl)piperidine-2,6-dione;
[1482] 3-(5-(((1S,2R)-2-(3-(3,3-difluorocyclobutoxy)azetidin-1-yl)cyclohexyl)oxy)-1-oxoisoindolin-2-yl)piperidine-2,6-dione;
[1483] 3-(5-(((1R,2R)-2-(3-(3,3-difluorocyclobutoxy)azetidin-1-yl)cyclohexyl)oxy)-1-oxoisoindolin-2-yl)piperidine-2,6-dione;
[1484] 3-(5-((2-(3-(3,3-difluorocyclobutoxy)azetidin-1-yl)cyclohexyl)oxy)-1-oxoisoindolin-2-yl)piperidine-2,6-dione;
[1485] 3-(5-(((1S,2S)-2-(4-hydroxypiperidin-1-yl)cyclopentyl)oxy)-1-oxoisoindolin-2-yl)piperidine-2,6-dione;
[1486] 3-(5-(((1S,2R)-2-(4-hydroxypiperidin-1-yl)cyclopentyl)oxy)-1-oxoisoindolin-2-yl)piperidine-2,6-dione;
[1487] 3-(5-(((1R,2R)-2-(4-hydroxypiperidin-1-yl)cyclopentyl)oxy)-1-oxoisoindolin-2-yl)piperidine-2,6-dione;
[1488] 3-(5-(((1R,2S)-2-(4-hydroxypiperidin-1-yl)cyclopentyl)oxy)-1-oxoisoindolin-2-yl)piperidine-2,6-dione;
[1489] 3-(5-((2-(4-hydroxypiperidin-1-yl)cyclopentyl)oxy)-1-oxoisoindolin-2-yl)piperidine-2,6-dione;
[1490] 3-(1-oxo-5-(((1S,2S)-2-(4-oxopiperidin-1-yl)cyclopentyl)oxy)isoindolin-2-yl)piperidine-2,6-dione;
[1491] 3-(5-(((1S,2S)-2-(3-hydroxypyrrolidin-1-yl)cyclopentyl)oxy)-1-oxoisoindolin-2-yl)piperidine-2,6-dione;
[1492] 3-(5-(((1S,2R)-2-(3-hydroxypyrrolidin-1-yl)cyclopentyl)oxy)-1-oxoisoindolin-2-yl)piperidine-2,6-dione;
[1493] 3-(5-(((1R,2R)-2-(3-hydroxypyrrolidin-1-yl)cyclopentyl)oxy)-1-oxoisoindolin-2-yl)piperidine-2,6-dione;
[1494] 3-(5-(((1R,2S)-2-(3-hydroxypyrrolidin-1-yl)cyclopentyl)oxy)-1-oxoisoindolin-2-yl)piperidine-2,6-dione;
[1495] 3-(5-((2-(3-hydroxypyrrolidin-1-yl)cyclopentyl)oxy)-1-oxoisoindolin-2-yl)piperidine-2,6-dione;
[1496] 3-(5-(((1S,2S)-2-(3-hydroxy-3-methylazetidin-1-yl)cyclopentyl)oxy)-1-oxoisoindolin-2-yl)piperidine-2,6-dione;
[1497] 3-(5-(((1S,2R)-2-(3-hydroxy-3-methylazetidin-1-yl)cyclopentyl)oxy)-1-oxoisoindolin-2-yl)piperidine-2,6-dione;
[1498] 3-(5-(((1R,2R)-2-(3-hydroxy-3-methylazetidin-1-yl)cyclopentyl)oxy)-1-oxoisoindolin-2--yl)piperidine-2,6-dione;
[1499] 3-(5-(((1R,2S)-2-(3-hydroxy-3-methylazetidin-1-yl)cyclopentyl)oxy)-1-oxoisoindolin-2-yl)piperidine-2,6-dione;
[1500] 3-(5-((2-(3-hydroxy-3-methylazetidin-1-yl)cyclopentyl)oxy)-1-oxoisoindolin-2-yl)piperidine-2,6-dione;
[1501] 3-(5-(((1S,2S)-2-(isobutylamino)cyclopentyl)oxy)-1-oxoisoindolin-2-yl)piperidine-2,6-dione;
[1502] 3-(5-(((1S,2R)-2-(isobutylamino)cyclopentyl)oxy)-1-oxoisoindolin-2-yl)piperidine-2,6-dione;
[1503] 3-(5-(((1R,2R)-2-(isobutylamino)cyclopentyl)oxy)-1-oxoisoindolin-2-yl)piperidine-2,6-dione;
[1504] 3-(5-(((1R,2S)-2-(isobutylamino)cyclopentyl)oxy)-1-oxoisoindolin-2-yl)piperidine-2,6-dione;
[1505] 3-(5-((2-(isobutylamino)cyclopentyl)oxy)-1-oxoisoindolin-2-yl)piperidine-2,6-dione;
[1506] 3-(5-(((1S,2S)-2-(ethyl(methyl)amino)cyclopentyl)oxy)-1-oxoisoindolin-2-yl)piperidine-2,6-dione;
[1507] 3-(5-(((1S,2R)-2-(ethyl(methyl)amino)cyclopentyl)oxy)-1-oxoisoindolin-2-yl)piperidine-2,6-dione;
[1508] 3-(5-(((1R,2R)-2-(ethyl(methyl)amino)cyclopentyl)oxy)-1-oxoisoindolin-2-yl)piperidine-2,6-dione;
[1509] 3-(5-(((1R,2S)-2-(ethyl(methyl)amino)cyclopentyl)oxy)-1-oxoisoindolin-2-yl)piperidine-2,6-dione;
[1510] 3-(5-((2-(ethyl(methyl)amino)cyclopentyl)oxy)-1-oxoisoindolin-2-yl)piperidine-2,6-dione
[1511] 3-(1-oxo-5-(((1S,2S)-2-((3aR,6aS)-tetrahydro-1H-furo[3,4-c]pyrrol-5(3H)-yl)cyclopentyl)oxy)isoindolin-2-yl)piperidine-2,6-dione;
[1512] 3-(1-oxo-5-(((1S,2R)-2-((3aR,6aS)-tetrahydro-1H-furo[3,4-c]pyrrol-5(3H)-yl)cyclopentyl)oxy)isoindolin-2-yl)piperidine-2,6-dione;
[1513] 3-(1-oxo-5-(((1R,2R)-2-((3aR,6aS)-tetrahydro-1H-furo[3,4-c]pyrrol-5(3H)-yl)cyclopentyl)oxy)isoindolin-2-yl)piperidine-2,6-dione;
[1514] 3-(1-oxo-5-(((1R,2S)-2-((3aR,6aS)-tetrahydro-1H-furo[3,4-c]pyrrol-5(3H)-yl)cyclopentyl)oxy)isoindolin-2-yl)piperidine-2,6-dione;
[1515] 3-(1-oxo-5-((2-((3aR,6aS)-tetrahydro-1H-furo[3,4-c]pyrrol-5(3H)-yl)cyclopentyl)oxy)isoindolin-2-yl)piperidine-2,6-dione;
[1516] 3-(1-oxo-5-((2-(tetrahydro-1H-furo[3,4-c]pyrrol-5(3H)-yl)cyclopentyl)oxy)isoindolin-2-yl)piperidine-2,6-dione;
[1517] 3-(1-oxo-5-(((1S,2S)-2-((pyridin-2-ylmethyl)amino)cyclopentyl)oxy)isoindolin-2-yl)piperidine-2,6-dione;
[1518] 3-(1-oxo-5-(((1S,2R)-2-((pyridin-2-ylmethyl)amino)cyclopentyl)oxy)isoindolin-2-yl)piperidine-2,6-dione;
[1519] 3-(1-oxo-5-(((1R,2R)-2-((pyridin-2-ylmethyl)amino)cyclopentyl)oxy)isoindolin-2-yl)piperidine-2,6-dione
[1520] 3-(1-oxo-5-(((1R,2S)-2-((pyridin-2-ylmethyl)amino)cyclopentyl)oxy)isoindolin-2-yl)piperidine-2,6-dione;
[1521] 3-(1-oxo-5-((2-((pyridin-2-ylmethyl)amino)cyclopentyl)oxy)isoindolin-2-yl)piperidine-2,6-dione;
[1522] 3-(1-oxo-5-(((1S,2S)-2-(pyrrolidin-1-yl)cyclopentyl)oxy)isoindolin-2-yl)piperidine-2,6-dione;
[1523] 3-(1-oxo-5-(((1S,2R)-2-(pyrrolidin-1-yl)cyclopentyl)oxy)isoindolin-2-yl)piperidine-2,6-dione;
[1524] 3-(1-oxo-5-(((1R,2R)-2-(pyrrolidin-1-yl)cyclopentyl)oxy)isoindolin-2-yl)piperidine-2,6-dione;
[1525] 3-(1-oxo-5-(((1R,2S)-2-(pyrrolidin-1-yl)cyclopentyl)oxy)isoindolin-2-yl)piperidine-2,6-dione;
[1526] 3-(1-oxo-5-((2-(pyrrolidin-1-yl)cyclopentyl)oxy)isoindolin-2-yl)piperidine-2,6-dione;
[1527] 3-(5-(((1S,2S)-2-(2-oxa-6-azaspiro[3.3]heptan-6-yl)cyclopentyl)oxy)-1-oxoisoindolin-2-yl)piperidine-2,6-dione;
[1528] 3-(5-(((1S,2R)-2-(2-oxa-6-azaspiro[3.3]heptan-6-yl)cyclopentyl)oxy)-1-oxoisoindolin-2-yl)piperidine-2,6-dione;
[1529] 3-(5-(((1R,2R)-2-(2-oxa-6-azaspiro[3.3]heptan-6-yl)cyclopentyl)oxy)-1-oxoisoindolin-2-yl)piperidine-2,6-dione;
[1530] 3-(5-(((1R,2S)-2-(2-oxa-6-azaspiro[3.3]heptan-6-yl)cyclopentyl)oxy)-1-oxoisoindolin-2-yl)piperidine-2,6-dione;
[1531] 3-(5-((2-(2-oxa-6-azaspiro[3.3]heptan-6-yl)cyclopentyl)oxy)-1-oxoisoindolin-2-yl)piperidine-2,6-dione;
[1532] 3-(5-(((1S,2S)-2-(bis((3-methyloxetan-3-yl)methyl)amino)cyclopentyl)oxy)-1-oxoisoindolin-2-yl)piperidine-2,6-dione;
[1533] 3-(5-(((1S,2R)-2-(bis((3-methyloxetan-3-yl)methyl)amino)cyclopentyl)oxy)-1-oxoisoindolin-2-yl)piperidine-2,6-dione;
[1534] 3-(5-(((1R,2R)-2-(bis((3-methyloxetan-3-yl)methyl)amino)cyclopentyl)oxy)-1-oxoisoindolin-2-yl)piperidine-2,6-dione;
[1535] 3-(5-(((1R,2S)-2-(bis((3-methyloxetan-3-yl)methyl)amino)cyclopentyl)oxy)-1-oxoisoindolin-2-yl)piperidine-2,6-dione;
[1536] 3-(5-((2-(bis((3-methyloxetan-3-yl)methyl)amino)cyclopentyl)oxy)-1-oxoisoindolin-2-yl)piperidine-2,6-dione;
[1537] 3-(5-(((1S,2S)-2-(4-methylpiperidin-1-yl)cyclopentyl)oxy)-1-oxoisoindolin-2-yl)piperidine-2,6-dione;
[1538] 3-(5-(((1S,2R)-2-(4-methylpiperidin-1-yl)cyclopentyl)oxy)-1-oxoisoindolin-2-yl)piperidine-2,6-dione;
[1539] 3-(5-(((1R,2R)-2-(4-methylpiperidin-1-yl)cyclopentyl)oxy)-1-oxoisoindolin-2-yl)piperidine-2,6-dione;
[1540] 3-(5-(((1R,2S)-2-(4-methylpiperidin-1-yl)cyclopentyl)oxy)-1-oxoisoindolin-2-yl)piperidine-2,6-dione;
[1541] 3-(5-((2-(4-methylpiperidin-1-yl)cyclopentyl)oxy)-1-oxoisoindolin-2-yl)piperidine-2,6-dione;
[1542] 3-(1-oxo-5-(((1S,2S)-2-((pyridin-3-ylmethyl)amino)cyclopentyl)oxy)isoindolin-2-yl)piperidine-2,6-dione;
[1543] 3-(1-oxo-5-(((1S,2R)-2-((pyridin-3-ylmethyl)amino)cyclopentyl)oxy)isoindolin-2-yl)piperidine-2,6-dione;
[1544] 3-(1-oxo-5-(((1R,2R)-2-((pyridin-3-ylmethyl)amino)cyclopentyl)oxy)isoindolin-2-yl)piperidine-2,6-dione;
[1545] 3-(1-oxo-5-(((1R,2S)-2-((pyridin-3-ylmethyl)amino)cyclopentyl)oxy)isoindolin-2-yl)piperidine-2,6-dione;
[1546] 3-(1-oxo-5-((2-((pyridin-3-ylmethyl)amino)cyclopentyl)oxy)isoindolin-2-yl)piperidine-2,6-dione;
[1547] 3-(1-oxo-5-(((1S,2S)-2-((pyridin-4-ylmethyl)amino)cyclopentyl)oxy)isoindolin-2-yl)piperidine-2,6-dione;
[1548] 3-(1-oxo-5-(((1S,2R)-2-((pyridin-4-ylmethyl)amino)cyclopentyl)oxy)isoindolin-2-yl)piperidine-2,6-dione;
[1549] 3-(1-oxo-5-(((1R,2R)-2-((pyridin-4-ylmethyl)amino)cyclopentyl)oxy)isoindolin-2-yl)piperidine-2,6-dione;
[1550] 3-(1-oxo-5-(((1R,2S)-2-((pyridin-4-ylmethyl)amino)cyclopentyl)oxy)isoindolin-2-yl)piperidine-2,6-dione;
[1551] 3-(1-oxo-5-((2-((pyridin-4-ylmethyl)amino)cyclopentyl)oxy)isoindolin-2-yl)piperidine-2,6-dione;
[1552] 3-(5-(((1S,2S)-2-(4-methoxy-4-methylpiperidin-1-yl)cyclopentyl)oxy)-1-oxoisoindolin-2-yl)piperidine-2,6-dione;
[1553] 3-(5-(((1S,2R)-2-(4-methoxy-4-methylpiperidin-1-yl)cyclopentyl)oxy)-1-oxoisoindolin-2-yl)piperidine-2,6-dione;
[1554] 3-(5-(((1R,2R)-2-(4-methoxy-4-methylpiperidin-1-yl)cyclopentyl)oxy)-1-oxoisoindolin-2-yl)piperidine-2,6-dione;
[1555] 3-(5-(((1R,2S)-2-(4-methoxy-4-methylpiperidin-1-yl)cyclopentyl)oxy)-1-oxoisoindolin-2-yl)piperidine-2,6-dione;
[1556] 3-(5-((2-(4-methoxy-4-methylpiperidin-1-yl)cyclopentyl)oxy)-1-oxoisoindolin-2-yl)piperidine-2,6-dione;
[1557] 3-(5-(((1S,2S)-2-(4,4-dimethylpiperidin-1-yl)cyclopentyl)oxy)-1-oxoisoindolin-2--yl)piperidine-2,6-dione;
[1558] 3-(5-(((1S,2R)-2-(4,4-dimethylpiperidin-1-yl)cyclopentyl)oxy)-1-oxoisoindolin-2-yl)piperidine-2,6-dione;
[1559] 3-(5-(((1R,2R)-2-(4,4-dimethylpiperidin-1-yl)cyclopentyl)oxy)-1-oxoisoindolin-2-yl)piperidine-2,6-dione;
[1560] 3-(5-(((1R,2S)-2-(4,4-dimethylpiperidin-1-yl)cyclopentyl)oxy)-1-oxoisoindolin-2-yl)piperidine-2,6-dione;
[1561] 3-(5-((2-(4,4-dimethylpiperidin-1-yl)cyclopentyl)oxy)-1-oxoisoindolin-2-yl)piperidine-2,6-dione;
[1562] 3-(5-(((1S,2S)-2-(4-methoxypiperidin-1-yl)cyclopentyl)oxy)-1-oxoisoindolin-2-yl)piperidine-2,6-dione;
[1563] 3-(5-(((1S,2R)-2-(4-methoxypiperidin-1-yl)cyclopentyl)oxy)-1-oxoisoindolin-2-yl)piperidine-2,6-dione;
[1564] 3-(5-(((1R,2R)-2-(4-methoxypiperidin-1-yl)cyclopentyl)oxy)-1-oxoisoindolin-2-yl)piperidine-2,6-dione;
[1565] 3-(5-(((1R,2S)-2-(4-methoxypiperidin-1-yl)cyclopentyl)oxy)-1-oxoisoindolin-2-yl)piperidine-2,6-dione;
[1566] 3-(5-((2-(4-methoxypiperidin-1-yl)cyclopentyl)oxy)-1-oxoisoindolin-2-yl)piperidine-2,6-dione;
[1567] 3-(5-(((1S,2S)-2-(ethyl(oxetan-3-ylmethyl)amino)cyclopentyl)oxy)-1-oxoisoindolin-2-yl)piperidine-2,6-dione;
[1568] 3-(5-(((1S,2R)-2-(ethyl(oxetan-3-ylmethyl)amino)cyclopentyl)oxy)-1-oxoisoindolin-2-yl)piperidine-2,6-dione;
[1569] 3-(5-(((1R,2R)-2-(ethyl(oxetan-3-ylmethyl)amino)cyclopentyl)oxy)-1-oxoisoindolin-2-yl)piperidine-2,6-dione;
[1570] 3-(5-(((1R,2S)-2-(ethyl(oxetan-3-ylmethyl)amino)cyclopentyl)oxy)-1-oxoisoindolin-2-yl)piperidine-2,6-dione;
[1571] 3-(5-((2-(ethyl(oxetan-3-ylmethyl)amino)cyclopentyl)oxy)-1-oxoisoindolin-2-yl)piperidine-2,6-dione;
[1572] 3-(5-(((1S,2S)-2-(isoindolin-2-yl)cyclopentyl)oxy)-1-oxoisoindolin-2-yl)piperidine-2,6-dione;
[1573] 3-(5-(((1S,2R)-2-(isoindolin-2-yl)cyclopentyl)oxy)-1-oxoisoindolin-2-yl)piperidine-2,6-dione;
[1574] 3-(5-(((1R,2R)-2-(isoindolin-2-yl)cyclopentyl)oxy)-1-oxoisoindolin-2-yl)piperidine-2,6-dione;
[1575] 3-(5-(((1R,2S)-2-(isoindolin-2-yl)cyclopentyl)oxy)-1-oxoisoindolin-2-yl)piperidine-2,6-dione;
[1576] 3-(5-((2-(isoindolin-2-yl)cyclopentyl)oxy)-1-oxoisoindolin-2-yl)piperidine-2,6-dione;
[1577] 3-(5-(((1S,2S)-2-(3-methoxyazetidin-1-yl)cyclopentyl)oxy)-1-oxoisoindolin-2-yl)piperidine-2,6-dione;
[1578] 3-(5-(((1S,2R)-2-(3-methoxyazetidin-1-yl)cyclopentyl)oxy)-1-oxoisoindolin-2-yl)piperidine-2,6-dione;
[1579] 3-(5-(((1R,2R)-2-(3-methoxyazetidin-1-yl)cyclopentyl)oxy)-1-oxoisoindolin-2-yl)piperidine-2,6-dione;
[1580] 3-(5-(((1R,2S)-2-(3-methoxyazetidin-1-yl)cyclopentyl)oxy)-1-oxoisoindolin-2-yl)piperidine-2,6-dione;
[1581] 3-(5-((2-(3-methoxyazetidin-1-yl)cyclopentyl)oxy)-1-oxoisoindolin-2-yl)piperidine-2,6-dione;
[1582] 3-(5-(((1S,2S)-2-(4-ethoxy-4-methylpiperidin-1-yl)cyclopentyl)oxy)-1-oxoisoindolin-2-yl)piperidine-2,6-dione;
[1583] 3-(5-(((1S,2R)-2-(4-ethoxy-4-methylpiperidin-1-yl)cyclopentyl)oxy)-1-oxoisoindolin-2-yl)piperidine-2,6-dione;
[1584] 3-(5-(((1R,2R)-2-(4-ethoxy-4-methylpiperidin-1-yl)cyclopentyl)oxy)-1-oxoisoindolin-2-yl)piperidine-2,6-dione;
[1585] 3-(5-(((1R,2S)-2-(4-ethoxy-4-methylpiperidin-1-yl)cyclopentyl)oxy)-1-oxoisoindolin-2-yl)piperidine-2,6-dione;
[1586] 3-(5-((2-(4-ethoxy-4-methylpiperidin-1-yl)cyclopentyl)oxy)-1-oxoisoindolin-2-yl)piperidine-2,6-dione;
[1587] 3-(5-(((1S,2S)-2-((((1R,4S)-4-methoxycyclohexyl)methyl)amino)cyclopentyl)oxy)-1-oxoisoindolin-2-yl)piperidine-2,6-dione;
[1588] 3-(5-(((1S,2R)-2-((((1R,4R)-4-methoxycyclohexyl)methyl)amino)cyclopentyl)oxy)-1-oxoisoindolin-2-yl)piperidine-2,6-dione;
[1589] 3-(5-(((1R,2R)-2-((((1R,4R)-4-methoxycyclohexyl)methyl)amino)cyclopentyl)oxy)-1-oxoisoindolin-2-yl)piperidine-2,6-dione;
[1590] 3-(5-(((1R,2S)-2-((((1R,4S)-4-methoxycyclohexyl)methyl)amino)cyclopentyl)oxy)-1-oxoisoindolin-2-yl)piperidine-2,6-dione;
[1591] 3-(5-((2-((((1R,4R)-4-methoxycyclohexyl)methyl)amino)cyclopentyl)oxy)-1-oxoisoindolin-2-yl)piperidine-2,6-dione;
[1592] 3-(5-((2-(((4-methoxycyclohexyl)methyl)amino)cyclopentyl)oxy)-1-oxoisoindolin-2-yl)piperidine-2,6-dione;
[1593] (1S,4R)-4-((((1S,2S)-2-((2-(2,6-dioxopiperidin-3-yl)-1-oxoisoindolin-5-yl)oxy)cyclopentyl)amino)methyl)cyclohexane-1-carbonitrile;
[1594] (1R,4r)-4-((((1R,2S)-2-((2-(2,6-dioxopiperidin-3-yl)-1-oxoisoindolin-5-yl)oxy)cyclopentyl)amino)methyl)cyclohexane-1-carbonitrile;
[1595] (1R,4r)-4-((((1R,2R)-2-((2-(2,6-dioxopiperidin-3-yl)-1-oxoisoindolin-5-yl)oxy)cyclopentyl)amino)methyl)cyclohexane-1-carbonitrile;
[1596] (1S,4r)-4-((((1S,2R)-2-((2-(2,6-dioxopiperidin-3-yl)-1-oxoisoindolin-5-yl)oxy)cyclopentyl)amino)methyl)cyclohexane-1-carbonitrile;
[1597] (1r,4r)-4-(((2-((2-(2,6-dioxopiperidin-3-yl)-1-oxoisoindolin-5-yl)oxy)cyclopentyl)amino)methyl)cyclohexane-1-carbonitrile;
[1598] 4-(((2-((2-(2,6-dioxopiperidin-3-yl)-1-oxoisoindolin-5-yl)oxy)cyclopentyl)amino)methyl)cyclohexane-1-carbonitrile;
[1599] 3-(5-(((1S,2S)-2-(((4-methoxycyclohexyl)methyl)amino)cyclopentyl)oxy)-1-oxoisoindolin-2-yl)piperidine-2,6-dione;
[1600] 3-(5-(((1S,2R)-2-(((4-methoxycyclohexyl)methyl)amino)cyclopentyl)oxy)-1-oxoisoindolin-2-yl)piperidine-2,6-dione;
[1601] 3-(5-(((1R,2R)-2-(((4-methoxycyclohexyl)methyl)amino)cyclopentyl)oxy)-1-oxoisoindolin-2-yl)piperidine-2,6-dione;
[1602] 3-(5-(((1R,2S)-2-(((4-methoxycyclohexyl)methyl)amino)cyclopentyl)oxy)-1-oxoisoindolin-2-yl)piperidine-2,6-dione;
[1603] 3-(5-((2-(((4-methoxycyclohexyl)methyl)amino)cyclopentyl)oxy)-1-oxoisoindolin-2-yl)piperidine-2,6-dione;
[1604] 3-(5-(((1S,2S)-2-(2-oxa-7-azaspiro[3.5]nonan-7-yl)cyclopentyl)oxy)-1-oxoisoindolin-2-yl)piperidine-2,6-dione;
[1605] 3-(5-(((1S,2R)-2-(2-oxa-7-azaspiro[3.5]nonan-7-yl)cyclopentyl)oxy)-1-oxoisoindolin-2-yl)piperidine-2,6-dione;
[1606] 3-(5-(((1R,2R)-2-(2-oxa-7-azaspiro[3.5]nonan-7-yl)cyclopentyl)oxy)-1-oxoisoindolin-2-yl)piperidine-2,6-dione;
[1607] 3-(5-(((1R,2S)-2-(2-oxa-7-azaspiro[3.5]nonan-7-yl)cyclopentyl)oxy)-1-oxoisoindolin-2-yl)piperidine-2,6-dione;
[1608] 3-(5-((2-(2-oxa-7-azaspiro[3.5]nonan-7-yl)cyclopentyl)oxy)-1-oxoisoindolin-2-yl)piperidine-2,6-dione;
[1609] 3-((((1S,2S)-2-((2-(2,6-dioxopiperidin-3-yl)-1-oxoisoindolin-5-yl)oxy)cyclopentyl)(ethyl)amino)methyl)-1-methylcyclobutane-1-carbonitrile;
[1610] (1S,3R)-3-((((1S,2S)-2-((2-(2,6-dioxopiperidin-3-yl)-1-oxoisoindolin-5-yl)oxy)cyclopentyl)(ethyl)amino)methyl)-1-methylcyclobutane-1-carbonitrile;
[1611] (1R,3S)-3-((((1S,2S)-2-((2-(2,6-dioxopiperidin-3-yl)-1-oxoisoindolin-5-yl)oxy)cyclopentyl)(ethyl)amino)methyl)-1-methylcyclobutane-1-carbonitrile;
[1612] trans-3-((((1S,2S)-2-((2-(2,6-dioxopiperidin-3-yl)-1-oxoisoindolin-5-yl)oxy)cyclopentyl)(ethyl)amino)methyl)-1-methylcyclobutane-1-carbonitrile;
[1613] cis-3-((((1S,2S)-2-((2-(2,6-dioxopiperidin-3-yl)-1-oxoisoindolin-5-yl)oxy)cyclopentyl)(ethyl)amino)methyl)-1-methylcyclobutane-1-carbonitrile;
[1614] 3-(5-(((1S,2S)-2-(4-fluoropiperidin-1-yl)cyclopentyl)oxy)-1-oxoisoindolin-2-yl)piperidine-2,6-dione;
[1615] 3-(5-(((1S,2R)-2-(4-fluoropiperidin-1-yl)cyclopentyl)oxy)-1-oxoisoindolin-2-yl)piperidine-2,6-dione;
[1616] 3-(5-(((1R,2R)-2-(4-fluoropiperidin-1-yl)cyclopentyl)oxy)-1-oxoisoindolin-2-yl)piperidine-2,6-dione;
[1617] 3-(5-(((1R,2S)-2-(4-fluoropiperidin-1-yl)cyclopentyl)oxy)-1-oxoisoindolin-2-yl)piperidine-2,6-dione;
[1618] 3-(5-((2-(4-fluoropiperidin-1-yl)cyclopentyl)oxy)-1-oxoisoindolin-2-yl)piperidine-2,6-dione;
[1619] 3-(5-(((1S,2S)-2-(1,5-oxazocan-5-yl)cyclopentyl)oxy)-1-oxoisoindolin-2-yl)piperidine-2,6-dione;
[1620] 3-(5-(((1S,2R)-2-(1,5-oxazocan-5-yl)cyclopentyl)oxy)-1-oxoisoindolin-2-yl)piperidine-2,6-dione;
[1621] 3-(5-(((1R,2R)-2-(1,5-oxazocan-5-yl)cyclopentyl)oxy)-1-oxoisoindolin-2-yl)piperidine-2,6-dione;
[1622] 3-(5-(((1R,2S)-2-(1,5-oxazocan-5-yl)cyclopentyl)oxy)-1-oxoisoindolin-2-yl)piperidine-2,6-dione;
[1623] 3-(5-((2-(1,5-oxazocan-5-yl)cyclopentyl)oxy)-1-oxoisoindolin-2-yl)piperidine-2,6-dione;
[1624] 3-(5-((2-(3,3-dimethylpiperidin-1-yl)cyclopentyl)oxy)-1-oxoisoindolin-2-yl)piperidine-2,6-dione;
[1625] 3-(5-(((1R,2S)-2-(3,3-dimethylpiperidin-1-yl)cyclopentyl)oxy)-1-oxoisoindolin-2-yl)piperidine-2,6-dione;
[1626] 3-(5-(((1R,2R)-2-(3,3-dimethylpiperidin-1-yl)cyclopentyl)oxy)-1-oxoisoindolin-2-yl)piperidine-2,6-dione;
[1627] 3-(5-(((1S,2R)-2-(3,3-dimethylpiperidin-1-yl)cyclopentyl)oxy)-1-oxoisoindolin-2-yl)piperidine-2,6-dione;
[1628] 3-(5-(((1S,2S)-2-(3,3-dimethylpiperidin-1-yl)cyclopentyl)oxy)-1-oxoisoindolin-2-yl)piperidine-2,6-dione;
[1629] 3-(5-(((1S,2S)-2-(ethyl(((1R,4S)-4-methoxycyclohexyl)methyl)amino)cyclopentyl)oxy)-1-oxoisoindolin-2-yl)piperidine-2,6-dione;
[1630] 3-(5-(((1S,2S)-2-((((1R,4S)-4-methoxycyclohexyl)methyl)(methyl)amino)cyclopentyl)oxy)-1-oxoisoindolin-2-yl)piperidine-2,6-dione;
[1631] trans-3-(5-((2-(diethylamino)-4,4-dimethylcyclopentyl)oxy)-1-oxoisoindolin-2-yl)piperidine-2,6-dione;
[1632] cis-3-(5-((2-(diethylamino)-4,4-dimethylcyclopentyl)oxy)-1-oxoisoindolin-2-yl)piperidine-2,6-dione;
[1633] 3-(5-((2-(diethylamino)-4,4-dimethylcyclopentyl)oxy)-1-oxoisoindolin-2-yl)piperidine-2,6-dione;
[1634] 3-(5-(((1R,2S)-2-(diethylamino)-4,4-dimethylcyclopentyl)oxy)-1-oxoisoindolin-2-yl)piperidine-2,6-dione;
[1635] 3-(5-(((1R,2R)-2-(diethylamino)-4,4-dimethylcyclopentyl)oxy)-1-oxoisoindolin-2-yl)piperidine-2,6-dione;
[1636] 3-(5-(((1S,2R)-2-(diethylamino)-4,4-dimethylcyclopentyl)oxy)-1-oxoisoindolin-2-yl)piperidine-2,6-dione;
[1637] 3-(5-(((1S,2S)-2-(diethylamino)-4,4-dimethylcyclopentyl)oxy)-1-oxoisoindolin-2-yl)piperidine-2,6-dione;
[1638] 3-(5-(((1S,2S)-2-(((4,4-difluorocyclohexyl)methyl)amino)cyclopentyl)oxy)-1-oxoisoindolin-2-yl)piperidine-2,6-dione;
[1639] 3-(5-(((1S,2R)-2-(((4,4-difluorocyclohexyl)methyl)amino)cyclopentyl)oxy)-1-oxoisoindolin-2-yl)piperidine-2,6-dione;
[1640] 3-(5-(((1R,2R)-2-(((4,4-difluorocyclohexyl)methyl)amino)cyclopentyl)oxy)-1-oxoisoindolin-2-yl)piperidine-2,6-dione;
[1641] 3-(5-(((1R,2S)-2-(((4,4-difluorocyclohexyl)methyl)amino)cyclopentyl)oxy)-1-oxoisoindolin-2-yl)piperidine-2,6-dione;
[1642] 3-(5-((2-(((4,4-difluorocyclohexyl)methyl)amino)cyclopentyl)oxy)-1-oxoisoindolin-2-yl)piperidine-2,6-dione;
[1643] 3-(5-(((1S,2S)-2-(((1H-indol-5-yl)methyl)amino)cyclopentyl)oxy)-1-oxoisoindolin-2-yl)piperidine-2,6-dione;
[1644] 3-(5-(((1S,2R)-2-(((1H-indol-5-yl)methyl)amino)cyclopentyl)oxy)-1-oxoisoindolin-2-yl)piperidine-2,6-dione;
[1645] 3-(5-(((1R,2R)-2-(((1H-indol-5-yl)methyl)amino)cyclopentyl)oxy)-1-oxoisoindolin-2-yl)piperidine-2,6-dione;
[1646] 3-(5-(((1R,2S)-2-(((1H-indol-5-yl)methyl)amino)cyclopentyl)oxy)-1-oxoisoindolin-2-yl)piperidine-2,6-dione;
[1647] 3-(5-((2-(((1H-indol-5-yl)methyl)amino)cyclopentyl)oxy)-1-oxoisoindolin-2-yl)piperidine-2,6-dione;
[1648] 3-(5-(((1S,2S)-2-(4-(tert-butoxy)piperidin-1-yl)cyclopentyl)oxy)-1-oxoisoindolin-2-yl)piperidine-2,6-dione;
[1649] 3-(5-(((1S,2R)-2-(4-(tert-butoxy)piperidin-1-yl)cyclopentyl)oxy)-1-oxoisoindolin-2--yl)piperidine-2,6-dione;
[1650] 3-(5-(((1R,2R)-2-(4-(tert-butoxy)piperidin-1-yl)cyclopentyl)oxy)-1-oxoisoindolin-2-yl)piperidine-2,6-dione;
[1651] 3-(5-(((1R,2S)-2-(4-(tert-butoxy)piperidin-1-yl)cyclopentyl)oxy)-1-oxoisoindolin-2-yl)piperidine-2,6-dione;
[1652] 3-(5-((2-(4-(tert-butoxy)piperidin-1-yl)cyclopentyl)oxy)-1-oxoisoindolin-2-yl)piperidine-2,6-dione;
[1653] 3-(5-((2-(2-oxa-8-azaspiro[4.5]decan-8-yl)cyclopentyl)oxy)-1-oxoisoindolin-2-yl)piperidine-2,6-dione;
[1654] 3-(5-(((1R,2S)-2-(2-oxa-8-azaspiro[4.5]decan-8-yl)cyclopentyl)oxy)-1-oxoisoindolin-2-yl)piperidine-2,6-dione;
[1655] 3-(5-(((1R,2R)-2-(2-oxa-8-azaspiro[4.5]decan-8-yl)cyclopentyl)oxy)-1-oxoisoindolin-2-yl)piperidine-2,6-dione;
[1656] 3-(5-(((1S,2R)-2-(2-oxa-8-azaspiro[4.5]decan-8-yl)cyclopentyl)oxy)-1-oxoisoindolin-2-yl)piperidine-2,6-dione;
[1657] 3-(5-(((1S,2S)-2-(2-oxa-8-azaspiro[4.5]decan-8-yl)cyclopentyl)oxy)-1-oxoisoindolin-2-yl)piperidine-2,6-dione;
[1658] 3-(5-(((1S,2S)-2-(3-(2-chlorophenoxy)azetidin-1-yl)cyclopentyl)oxy)-1-oxoisoindolin-2-yl)piperidine-2,6-dione;
[1659] 3-(5-(((1S,2R)-2-(3-(2-chlorophenoxy)azetidin-1-yl)cyclopentyl)oxy)-1-oxoisoindolin-2-yl)piperidine-2,6-dione;
[1660] 3-(5-(((1R,2R)-2-(3-(2-chlorophenoxy)azetidin-1-yl)cyclopentyl)oxy)-1-oxoisoindolin-2-yl)piperidine-2,6-dione;
[1661] 3-(5-(((1R,2S)-2-(3-(2-chlorophenoxy)azetidin-1-yl)cyclopentyl)oxy)-1-oxoisoindolin-2-yl)piperidine-2,6-dione;
[1662] 3-(5-((2-(3-(2-chlorophenoxy)azetidin-1-yl)cyclopentyl)oxy)-1-oxoisoindolin-2-yl)piperidine-2,6-dione;
[1663] 3-(5-(((1S,2S)-2-(3-(2-methoxyphenoxy)azetidin-1-yl)cyclopentyl)oxy)-1-oxoisoindolin-2-yl)piperidine-2,6-dione;
[1664] 3-(5-(((1S,2R)-2-(3-(2-methoxyphenoxy)azetidin-1-yl)cyclopentyl)oxy)-1-oxoisoindolin-2-yl)piperidine-2,6-dione;
[1665] 3-(5-(((1R,2R)-2-(3-(2-methoxyphenoxy)azetidin-1-yl)cyclopentyl)oxy)-1-oxoisoindolin-2-yl)piperidine-2,6-dione;
[1666] 3-(5-(((1R,2S)-2-(3-(2-methoxyphenoxy)azetidin-1-yl)cyclopentyl)oxy)-1-oxoisoindolin-2-yl)piperidine-2,6-dione;
[1667] 3-(5-((2-(3-(2-methoxyphenoxy)azetidin-1-yl)cyclopentyl)oxy)-1-oxoisoindolin-2--yl)piperidine-2,6-dione;
[1668] 3-(5-((2-(6-azaspiro[3.5]nonan-6-yl)cyclopentyl)oxy)-1-oxoisoindolin-2-yl)piperidine-2,6-dione;
[1669] 3-(5-(((1S,2R)-2-(6-azaspiro[3.5]nonan-6-yl)cyclopentyl)oxy)-1-oxoisoindolin-2-yl)piperidine-2,6-dione;
[1670] 3-(5-(((1R,2R)-2-(6-azaspiro[3.5]nonan-6-yl)cyclopentyl)oxy)-1-oxoisoindolin-2-yl)piperidine-2,6-dione;
[1671] 3-(5-(((1R,2S)-2-(6-azaspiro[3.5]nonan-6-yl)cyclopentyl)oxy)-1-oxoisoindolin-2-yl)piperidine-2,6-dione;
[1672] 3-(5-(((1S,2S)-2-(6-azaspiro[3.5]nonan-6-yl)cyclopentyl)oxy)-1-oxoisoindolin-2-yl)piperidine-2,6-dione;
[1673] 3-(5-(((1S,2S)-2-(ethyl(((1S,3R)-3-methoxycyclobutyl)methyl)amino)cyclopentyl)oxy)-1-oxoisoindolin-2-yl)piperidine-2,6-dione;
[1674] 3-(5-(((1S,2R)-2-(ethyl(((1s,3S)-3-methoxycyclobutyl)methyl)amino)cyclopentyl)oxy)-1-oxoisoindolin-2-yl)piperidine-2,6-dione;
[1675] 3-(5-(((1R,2R)-2-(ethyl(((1s,3S)-3-methoxycyclobutyl)methyl)amino)cyclopentyl)oxy)-1-oxoisoindolin-2-yl)piperidine-2,6-dione;
[1676] 3-(5-(((1R,2S)-2-(ethyl(((1s,3R)-3-methoxycyclobutyl)methyl)amino)cyclopentyl)oxy)-1-oxoisoindolin-2-yl)piperidine-2,6-dione;
[1677] 3-(5-((2-(ethyl(((1s,3s)-3-methoxycyclobutyl)methyl)amino)cyclopentyl)oxy)-1-oxoisoindolin-2-yl)piperidine-2,6-dione;
[1678] 3-(5-(((1S,2S)-2-(diethylamino)-4,4-dimethylcyclopentyl)oxy)-1-oxoisoindolin-2-yl)piperidine-2,6-dione;
[1679] 3-(5-(((1S,2R)-2-(diethylamino)-4,4-dimethylcyclopentyl)oxy)-1-oxoisoindolin-2-yl)piperidine-2,6-dione;
[1680] 3-(5-(((1R,2R)-2-(diethylamino)-4,4-dimethylcyclopentyl)oxy)-1-oxoisoindolin-2-yl)piperidine-2,6-dione;
[1681] 3-(5-(((1R,2S)-2-(diethylamino)-4,4-dimethylcyclopentyl)oxy)-1-oxoisoindolin-2-yl)piperidine-2,6-dione;
[1682] 3-(5-((2-(diethylamino)-4,4-dimethylcyclopentyl)oxy)-1-oxoisoindolin-2-yl)piperidine-2,6-dione;
[1683] 3-(5-(((1S,2S)-2-(ethyl(((1R,3S)-3-methoxycyclobutyl)methyl)amino)cyclopentyl)oxy)-1-oxoisoindolin-2-yl)piperidine-2,6-dione;
[1684] 3-(5-(((1S,2R)-2-(ethyl(((1r,3R)-3-methoxycyclobutyl)methyl)amino)cyclopentyl)oxy)-1-oxoisoindolin-2-yl)piperidine-2,6-dione;
[1685] 3-(5-(((1R,2R)-2-(ethyl(((1r,3R)-3-methoxycyclobutyl)methyl)amino)cyclopentyl)oxy)-1-oxoisoindolin-2-yl)piperidine-2,6-dione;
[1686] 3-(5-(((1R,2S)-2-(ethyl(((1r,3S)-3-methoxycyclobutyl)methyl)amino)cyclopentyl)oxy)-1-oxoisoindolin-2-yl)piperidine-2,6-dione;
[1687] 3-(5-((2-(ethyl(((1r,3r)-3-methoxycyclobutyl)methyl)amino)cyclopentyl)oxy)-1-oxoisoindolin-2-yl)piperidine-2,6-dione;
[1688] 3-(5-((2-(8-oxa-2-azaspiro[4.5]decan-2-yl)cyclopentyl)oxy)-1-oxoisoindolin-2-yl)piperidine-2,6-dione;
[1689] 3-(5-(((1R,2S)-2-(8-oxa-2-azaspiro[4.5]decan-2-yl)cyclopentyl)oxy)-1-oxoisoindolin-2-yl)piperidine-2,6-dione;
[1690] 3-(5-(((1R,2R)-2-(8-oxa-2-azaspiro[4.5]decan-2-yl)cyclopentyl)oxy)-1-oxoisoindolin-2-yl)piperidine-2,6-dione;
[1691] 3-(5-(((1S,2R)-2-(8-oxa-2-azaspiro[4.5]decan-2-yl)cyclopentyl)oxy)-1-oxoisoindolin-2-yl)piperidine-2,6-dione;
[1692] 3-(5-(((1S,2S)-2-(8-oxa-2-azaspiro[4.5]decan-2-yl)cyclopentyl)oxy)-1-oxoisoindolin-2-yl)piperidine-2,6-dione;
[1693] 3-(1-oxo-5-(((1S,2S)-2-thiomorpholinocyclopentyl)oxy)isoindolin-2-yl)piperidine-2,6-dione;
[1694] 3-(1-oxo-5-(((1S,2R)-2-thiomorpholinocyclopentyl)oxy)isoindolin-2-yl)piperidine-2,6-dione;
[1695] 3-(1-oxo-5-(((1R,2R)-2-thiomorpholinocyclopentyl)oxy)isoindolin-2-yl)piperidine-2,6-dione;
[1696] 3-(1-oxo-5-(((1R,2S)-2-thiomorpholinocyclopentyl)oxy)isoindolin-2-yl)piperidine-2,6-dione;
[1697] 3-(1-oxo-5-((2-thiomorpholinocyclopentyl)oxy)isoindolin-2-yl)piperidine-2,6-dione;
[1698] 3-(5-(((1S,2S)-2-(1,4-oxazepan-4-yl)cyclopentyl)oxy)-1-oxoisoindolin-2-yl)piperidine-2,6-dione;
[1699] 3-(5-(((1S,2R)-2-(1,4-oxazepan-4-yl)cyclopentyl)oxy)-1-oxoisoindolin-2-yl)piperidine-2,6-dione;
[1700] 3-(5-(((1R,2R)-2-(1,4-oxazepan-4-yl)cyclopentyl)oxy)-1-oxoisoindolin-2-yl)piperidine-2,6-dione;
[1701] 3-(5-(((1R,2S)-2-(1,4-oxazepan-4-yl)cyclopentyl)oxy)-1-oxoisoindolin-2-yl)piperidine-2,6-dione;
[1702] 3-(5-((2-(1,4-oxazepan-4-yl)cyclopentyl)oxy)-1-oxoisoindolin-2-yl)piperidine-2,6-dione;
[1703] 3-(5-(((1S,2S)-2-(4-isopropoxypiperidin-1-yl)cyclopentyl)oxy)-1-oxoisoindolin-2-yl)piperidine-2,6-dione;
[1704] 3-(5-(((1S,2R)-2-(4-isopropoxypiperidin-1-yl)cyclopentyl)oxy)-1-oxoisoindolin-2-yl)piperidine-2,6-dione;
[1705] 3-(5-(((1R,2R)-2-(4-isopropoxypiperidin-1-yl)cyclopentyl)oxy)-1-oxoisoindolin-2-yl)piperidine-2,6-dione;
[1706] 3-(5-(((1R,2S)-2-(4-isopropoxypiperidin-1-yl)cyclopentyl)oxy)-1-oxoisoindolin-2--yl)piperidine-2,6-dione;
[1707] 3-(5-((2-(4-isopropoxypiperidin-1-yl)cyclopentyl)oxy)-1-oxoisoindolin-2-yl)piperidine-2,6-dione;
[1708] 3-(5-(((1S,2S)-2-(4-(cyclopropylmethoxy)piperidin-1-yl)cyclopentyl)oxy)-1-oxoisoindolin-2-yl)piperidine-2,6-dione;
[1709] 3-(5-(((1S,2R)-2-(4-(cyclopropylmethoxy)piperidin-1-yl)cyclopentyl)oxy)-1-oxoisoindolin-2-yl)piperidine-2,6-dione;
[1710] 3-(5-(((1R,2R)-2-(4-(cyclopropylmethoxy)piperidin-1-yl)cyclopentyl)oxy)-1-oxoisoindolin-2-yl)piperidine-2,6-dione;
[1711] 3-(5-(((1R,2S)-2-(4-(cyclopropylmethoxy)piperidin-1-yl)cyclopentyl)oxy)-1-oxoisoindolin-2-yl)piperidine-2,6-dione;
[1712] 3-(5-((2-(4-(cyclopropylmethoxy)piperidin-1-yl)cyclopentyl)oxy)-1-oxoisoindolin-2-yl)piperidine-2,6-dione;
[1713] 3-(5-(((1S,2S)-2-((3aR,4R,7S,7aS)-octahydro-2H-4,7-epoxyisoindol-2-yl)cyclopentyl)oxy)-1-oxoisoindolin-2-yl)piperidine-2,6-dione;
[1714] 3-(5-(((1S,2R)-2-((3aR,4R,7S,7aS)-octahydro-2H-4,7-epoxyisoindol-2-yl)cyclopentyl)oxy)-1-oxoisoindolin-2-yl)piperidine-2,6-dione;
[1715] 3-(5-(((1R,2R)-2-((3aR,4R,7S,7aS)-octahydro-2H-4,7-epoxyisoindol-2-yl)cyclopentyl)oxy)-1-oxoisoindolin-2-yl)piperidine-2,6-dione;
[1716] 3-(5-(((1R,2S)-2-((3aR,4R,7S,7aS)-octahydro-2H-4,7-epoxyisoindol-2-yl)cyclopentyl)oxy)-1-oxoisoindolin-2-yl)piperidine-2,6-dione;
[1717] 3-(5-((2-((3aR,4R,7S,7aS)-octahydro-2H-4,7-epoxyisoindol-2-yl)cyclopentyl)oxy)-1-oxoisoindolin-2-yl)piperidine-2,6-dione;
[1718] 3-(5-(((1S,2S)-2-(4-ethoxypiperidin-1-yl)cyclopentyl)oxy)-1-oxoisoindolin-2-yl)piperidine-2,6-dione;
[1719] 3-(5-(((1S,2R)-2-(4-ethoxypiperidin-1-yl)cyclopentyl)oxy)-1-oxoisoindolin-2-yl)piperidine-2,6-dione;
[1720] 3-(5-(((1R,2R)-2-(4-ethoxypiperidin-1-yl)cyclopentyl)oxy)-1-oxoisoindolin-2-yl)piperidine-2,6-dione;
[1721] 3-(5-(((1R,2S)-2-(4-ethoxypiperidin-1-yl)cyclopentyl)oxy)-1-oxoisoindolin-2-yl)piperidine-2,6-dione;
[1722] 3-(5-((2-(4-ethoxypiperidin-1-yl)cyclopentyl)oxy)-1-oxoisoindolin-2-yl)piperidine-2,6-dione;
[1723] 3-(5-(((1S,2S)-2-(7,8-dihydro-1,6-naphthyridin-6(5H)-yl)cyclopentyl)oxy)-1-oxoisoindolin-2-yl)piperidine-2,6-dione;
[1724] 3-(5-(((1S,2R)-2-(7,8-dihydro-1,6-naphthyridin-6(5H)-yl)cyclopentyl)oxy)-1-oxoisoindolin-2-yl)piperidine-2,6-dione;
[1725] 3-(5-(((1R,2R)-2-(7,8-dihydro-1,6-naphthyridin-6(5H)-yl)cyclopentyl)oxy)-1-oxoisoindolin-2-yl)piperidine-2,6-dione;
[1726] 3-(5-(((1R,2S)-2-(7,8-dihydro-1,6-naphthyridin-6(5H)-yl)cyclopentyl)oxy)-1-oxoisoindolin-2-yl)piperidine-2,6-dione;
[1727] 3-(5-((2-(7,8-dihydro-1,6-naphthyridin-6(5H)-yl)cyclopentyl)oxy)-1-oxoisoindolin-2-yl)piperidine-2,6-dione;
[1728] 3-(5-(((1S,2S)-2-((((1S,4R)-4-methoxycyclohexyl)methyl)amino)cyclopentyl)oxy)-1-oxoisoindolin-2-yl)piperidine-2,6-dione;
[1729] 3-(5-(((1S,2R)-2-((((1s,4S)-4-methoxycyclohexyl)methyl)amino)cyclopentyl)oxy)-1-oxoisoindolin-2-yl)piperidine-2,6-dione;
[1730] 3-(5-(((1R,2R)-2-((((1s,4S)-4-methoxycyclohexyl)methyl)amino)cyclopentyl)oxy)-1-oxoisoindolin-2-yl)piperidine-2,6-dione;
[1731] 3-(5-(((1R,2S)-2-((((1s,4R)-4-methoxycyclohexyl)methyl)amino)cyclopentyl)oxy)-1-oxoisoindolin-2-yl)piperidine-2,6-dione;
[1732] 3-(5-((2-((((1s,4s)-4-methoxycyclohexyl)methyl)amino)cyclopentyl)oxy)-1-oxoisoindolin-2-yl)piperidine-2,6-dione;
[1733] 3-(5-(((1S,2S)-2-((R)-3-methoxypyrrolidin-1-yl)cyclopentyl)oxy)-1-oxoisoindolin-2-yl)piperidine-2,6-dione;
[1734] 3-(5-(((1S,2R)-2-((R)-3-methoxypyrrolidin-1-yl)cyclopentyl)oxy)-1-oxoisoindolin-2-yl)piperidine-2,6-dione;
[1735] 3-(5-(((1R,2R)-2-((R)-3-methoxypyrrolidin-1-yl)cyclopentyl)oxy)-1-oxoisoindolin-2-yl)piperidine-2,6-dione;
[1736] 3-(5-(((1R,2S)-2-((R)-3-methoxypyrrolidin-1-yl)cyclopentyl)oxy)-1-oxoisoindolin-2-yl)piperidine-2,6-dione;
[1737] 3-(5-((2-((R)-3-methoxypyrrolidin-1-yl)cyclopentyl)oxy)-1-oxoisoindolin-2-yl)piperidine-2,6-dione;
[1738] 3-(5-(((1S,2S)-2-((S)-3-methoxypyrrolidin-1-yl)cyclopentyl)oxy)-1-oxoisoindolin-2-yl)piperidine-2,6-dione;
[1739] 3-(5-(((1S,2R)-2-((S)-3-methoxypyrrolidin-1-yl)cyclopentyl)oxy)-1-oxoisoindolin-2-yl)piperidine-2,6-dione;
[1740] 3-(5-(((1R,2R)-2-((S)-3-methoxypyrrolidin-1-yl)cyclopentyl)oxy)-1-oxoisoindolin-2-yl)piperidine-2,6-dione;
[1741] 3-(5-(((1R,2S)-2-((S)-3-methoxypyrrolidin-1-yl)cyclopentyl)oxy)-1-oxoisoindolin-2-yl)piperidine-2,6-dione;
[1742] 3-(5-((2-((S)-3-methoxypyrrolidin-1-yl)cyclopentyl)oxy)-1-oxoisoindolin-2-yl)piperidine-2,6-dione;
[1743] 3-(5-(((1S,2S)-2-(((3,3-difluorocyclobutyl)methyl)amino)cyclopentyl)oxy)-1-oxoisoindolin-2-yl)piperidine-2,6-dione;
[1744] 3-(5-(((1S,2R)-2-(((3,3-difluorocyclobutyl)methyl)amino)cyclopentyl)oxy)-1-oxoisoindolin-2-yl)piperidine-2,6-dione;
[1745] 3-(5-(((1R,2R)-2-(((3,3-difluorocyclobutyl)methyl)amino)cyclopentyl)oxy)-1-oxoisoindolin-2-yl)piperidine-2,6-dione;
[1746] 3-(5-(((1R,2S)-2-(((3,3-difluorocyclobutyl)methyl)amino)cyclopentyl)oxy)-1-oxoisoindolin-2-yl)piperidine-2,6-dione;
[1747] 3-(5-((2-(((3,3-difluorocyclobutyl)methyl)amino)cyclopentyl)oxy)-1-oxoisoindolin-2-yl)piperidine-2,6-dione;
[1748] 3-(5-(((1S,2S)-2-(4-(difluoromethoxy)piperidin-1-yl)cyclopentyl)oxy)-1-oxoisoindolin-2-yl)piperidine-2,6-dione;
[1749] 3-(5-(((1S,2R)-2-(4-(difluoromethoxy)piperidin-1-yl)cyclopentyl)oxy)-1-oxoisoindolin-2-yl)piperidine-2,6-dione;
[1750] 3-(5-(((1R,2R)-2-(4-(difluoromethoxy)piperidin-1-yl)cyclopentyl)oxy)-1-oxoisoindolin-2-yl)piperidine-2,6-dione;
[1751] 3-(5-(((1R,2S)-2-(4-(difluoromethoxy)piperidin-1-yl)cyclopentyl)oxy)-1-oxoisoindolin-2-yl)piperidine-2,6-dione;
[1752] 3-(5-((2-(4-(difluoromethoxy)piperidin-1-yl)cyclopentyl)oxy)-1-oxoisoindolin-2-yl)piperidine-2,6-dione;
[1753] 3-(5-(((1S,2S)-2-(1,3-dihydro-2H-pyrrolo[3,4-c]pyridin-2-yl)cyclopentyl)oxy)-1-oxoisoindolin-2-yl)piperidine-2,6-dione;
[1754] 3-(5-(((1S,2R)-2-(1,3-dihydro-2H-pyrrolo[3,4-c]pyridin-2-yl)cyclopentyl)oxy)-1-oxoisoindolin-2-yl)piperidine-2,6-dione;
[1755] 3-(5-(((1R,2R)-2-(1,3-dihydro-2H-pyrrolo[3,4-c]pyridin-2-yl)cyclopentyl)oxy)-1-oxoisoindolin-2-yl)piperidine-2,6-dione;
[1756] 3-(5-(((1R,2S)-2-(1,3-dihydro-2H-pyrrolo[3,4-c]pyridin-2-yl)cyclopentyl)oxy)-1-oxoisoindolin-2-yl)piperidine-2,6-dione;
[1757] 3-(5-((2-(1,3-dihydro-2H-pyrrolo[3,4-c]pyridin-2-yl)cyclopentyl)oxy)-1-oxoisoindolin-2-yl)piperidine-2,6-dione;
[1758] 3-(1-oxo-5-(((1S,2S)-2-(propylamino)cyclohexyl)oxy)isoindolin-2-yl)piperidine-2,6-dione;
[1759] 3-(1-oxo-5-(((1S,2R)-2-(propylamino)cyclohexyl)oxy)isoindolin-2-yl)piperidine-2,6-dione;
[1760] 3-(1-oxo-5-(((1R,2R)-2-(propylamino)cyclohexyl)oxy)isoindolin-2-yl)piperidine-2,6-dione;
[1761] 3-(1-oxo-5-(((1R,2S)-2-(propylamino)cyclohexyl)oxy)isoindolin-2-yl)piperidine-2,6-dione;
[1762] 3-(1-oxo-5-((2-(propylamino)cyclohexyl)oxy)isoindolin-2-yl)piperidine-2,6-dione;
[1763] 3-(5-(((1S,2S)-2-(dipropylamino)cyclohexyl)oxy)-1-oxoisoindolin-2-yl)piperidine-2,6-dione;
[1764] 3-(5-(((1S,2R)-2-(dipropylamino)cyclohexyl)oxy)-1-oxoisoindolin-2-yl)piperidine-2,6-dione;
[1765] 3-(5-(((1R,2R)-2-(dipropylamino)cyclohexyl)oxy)-1-oxoisoindolin-2-yl)piperidine-2,6-dione;
[1766] 3-(5-(((1R,2S)-2-(dipropylamino)cyclohexyl)oxy)-1-oxoisoindolin-2-yl)piperidine-2,6-dione;
[1767] 3-(5-((2-(dipropylamino)cyclohexyl)oxy)-1-oxoisoindolin-2-yl)piperidine-2,6-dione;
[1768] 3-(1-oxo-5-(((1S,2S)-2-((pyridin-4-ylmethyl)amino)cyclohexyl)oxy)isoindolin-2-yl)piperidine-2,6-dione;
[1769] 3-(1-oxo-5-(((1S,2R)-2-((pyridin-4-ylmethyl)amino)cyclohexyl)oxy)isoindolin-2-yl)piperidine-2,6-dione;
[1770] 3-(1-oxo-5-(((1R,2R)-2-((pyridin-4-ylmethyl)amino)cyclohexyl)oxy)isoindolin-2-yl)piperidine-2,6-dione;
[1771] 3-(1-oxo-5-(((1R,2S)-2-((pyridin-4-ylmethyl)amino)cyclohexyl)oxy)isoindolin-2-yl)piperidine-2,6-dione;
[1772] 3-(1-oxo-5-((2-((pyridin-4-ylmethyl)amino)cyclohexyl)oxy)isoindolin-2-yl)piperidine-2,6-dione;
[1773] 3-(5-(((1S,2S)-2-(2-oxa-6-azaspiro[3.3]heptan-6-yl)cyclohexyl)oxy)-1-oxoisoindolin-2-yl)piperidine-2,6-dione;
[1774] 3-(5-(((1S,2R)-2-(2-oxa-6-azaspiro[3.3]heptan-6-yl)cyclohexyl)oxy)-1-oxoisoindolin-2-yl)piperidine-2,6-dione;
[1775] 3-(5-(((1R,2R)-2-(2-oxa-6-azaspiro[3.3]heptan-6-yl)cyclohexyl)oxy)-1-oxoisoindolin-2-yl)piperidine-2,6-dione;
[1776] 3-(5-(((1R,2S)-2-(2-oxa-6-azaspiro[3.3]heptan-6-yl)cyclohexyl)oxy)-1-oxoisoindolin-2-yl)piperidine-2,6-dione;
[1777] 3-(5-((2-(2-oxa-6-azaspiro[3.3]heptan-6-yl)cyclohexyl)oxy)-1-oxoisoindolin-2-yl)piperidine-2,6-dione;
[1778] 3-(1-oxo-5-(((1S,2S)-2-((pyridin-3-ylmethyl)amino)cyclohexyl)oxy)isoindolin-2-yl)piperidine-2,6-dione;
[1779] 3-(1-oxo-5-(((1S,2R)-2-((pyridin-3-ylmethyl)amino)cyclohexyl)oxy)isoindolin-2-yl)piperidine-2,6-dione;
[1780] 3-(1-oxo-5-(((1R,2R)-2-((pyridin-3-ylmethyl)amino)cyclohexyl)oxy)isoindolin-2-yl)piperidine-2,6-dione;
[1781] 3-(1-oxo-5-(((1R,2S)-2-((pyridin-3-ylmethyl)amino)cyclohexyl)oxy)isoindolin-2-yl)piperidine-2,6-dione;
[1782] 3-(1-oxo-5-((2-((pyridin-3-ylmethyl)amino)cyclohexyl)oxy)isoindolin-2-yl)piperidine-2,6-dione;
[1783] 3-(5-(((1S,2S)-2-(((1-ethyl-1H-pyrazol-4-yl)methyl)amino)cyclohexyl)oxy)-1-oxoisoindolin-2-yl)piperidine-2,6-dione;
[1784] 3-(5-(((1S,2R)-2-(((1-ethyl-1H-pyrazol-4-yl)methyl)amino)cyclohexyl)oxy)-1-oxoisoindolin-2-yl)piperidine-2,6-dione;
[1785] 3-(5-(((1R,2R)-2-(((1-ethyl-1H-pyrazol-4-yl)methyl)amino)cyclohexyl)oxy)-1-oxoisoindolin-2-yl)piperidine-2,6-dione;
[1786] 3-(5-(((1R,2S)-2-(((1-ethyl-1H-pyrazol-4-yl)methyl)amino)cyclohexyl)oxy)-1-oxoisoindolin-2-yl)piperidine-2,6-dione;
[1787] 3-(5-((2-(((1-ethyl-1H-pyrazol-4-yl)methyl)amino)cyclohexyl)oxy)-1-oxoisoindolin-2-yl)piperidine-2,6-dione;
[1788] 3-(5-(((1S,2S)-2-(((1-isopropyl-1H-pyrazol-4-yl)methyl)amino)cyclohexyl)oxy)-1-oxoisoindolin-2-yl)piperidine-2,6-dione;
[1789] 3-(5-(((1S,2R)-2-(((1-isopropyl-1H-pyrazol-4-yl)methyl)amino)cyclohexyl)oxy)-1-oxoisoindolin-2-yl)piperidine-2,6-dione;
[1790] 3-(5-(((1R,2R)-2-(((1-isopropyl-1H-pyrazol-4-yl)methyl)amino)cyclohexyl)oxy)-1-oxoisoindolin-2-yl)piperidine-2,6-dione;
[1791] 3-(5-(((1R,2S)-2-(((1-isopropyl-1H-pyrazol-4-yl)methyl)amino)cyclohexyl)oxy)-1-oxoisoindolin-2-yl)piperidine-2,6-dione;
[1792] 3-(5-((2-(((1-isopropyl-1H-pyrazol-4-yl)methyl)amino)cyclohexyl)oxy)-1-oxoisoindolin-2-yl)piperidine-2,6-dione;
[1793] 3-(5-(((1S,2S)-2-(ethyl(methyl)amino)cyclohexyl)oxy)-1-oxoisoindolin-2-yl)piperidine-2,6-dione;
[1794] 3-(5-(((1S,2R)-2-(ethyl(methyl)amino)cyclohexyl)oxy)-1-oxoisoindolin-2-yl)piperidine-2,6-dione;
[1795] 3-(5-(((1R,2R)-2-(ethyl(methyl)amino)cyclohexyl)oxy)-1-oxoisoindolin-2-yl)piperidine-2,6-dione;
[1796] 3-(5-(((1R,2S)-2-(ethyl(methyl)amino)cyclohexyl)oxy)-1-oxoisoindolin-2-yl)piperidine-2,6-dione;
[1797] 3-(5-((2-(ethyl(methyl)amino)cyclohexyl)oxy)-1-oxoisoindolin-2-yl)piperidine-2,6-dione;
[1798] 3-(5-(((1S,2S)-2-(dimethylamino)cyclohexyl)oxy)-1-oxoisoindolin-2-yl)piperidine-2,6-dione;
[1799] 3-(5-(((1S,2R)-2-(dimethylamino)cyclohexyl)oxy)-1-oxoisoindolin-2-yl)piperidine-2,6-dione;
[1800] 3-(5-(((1R,2R)-2-(dimethylamino)cyclohexyl)oxy)-1-oxoisoindolin-2-yl)piperidine-2,6-dione;
[1801] 3-(5-(((1R,2S)-2-(dimethylamino)cyclohexyl)oxy)-1-oxoisoindolin-2-yl)piperidine-2,6-dione;
[1802] 3-(5-((2-(dimethylamino)cyclohexyl)oxy)-1-oxoisoindolin-2-yl)piperidine-2,6-dione;
[1803] 3-(5-(((1S,2S)-2-((oxetan-3-ylmethyl)amino)cyclohexyl)oxy)-1-oxoisoindolin-2-yl)piperidine-2,6-dione;
[1804] 3-(5-(((1S,2R)-2-((oxetan-3-ylmethyl)amino)cyclohexyl)oxy)-1-oxoisoindolin-2-yl)piperidine-2,6-dione;
[1805] 3-(5-(((1R,2R)-2-((oxetan-3-ylmethyl)amino)cyclohexyl)oxy)-1-oxoisoindolin-2-yl)piperidine-2,6-dione;
[1806] 3-(5-(((1R,2S)-2-((oxetan-3-ylmethyl)amino)cyclohexyl)oxy)-1-oxoisoindolin-2--yl)piperidine-2,6-dione;
[1807] 3-(5-((2-((oxetan-3-ylmethyl)amino)cyclohexyl)oxy)-1-oxoisoindolin-2-yl)piperidine-2,6-dione;
[1808] 3-(5-(((1S,2S)-2-((2-hydroxyethyl)amino)cyclohexyl)oxy)-1-oxoisoindolin-2-yl)piperidine-2,6-dione;
[1809] 3-(5-(((1S,2R)-2-((2-hydroxyethyl)amino)cyclohexyl)oxy)-1-oxoisoindolin-2-yl)piperidine-2,6-dione;
[1810] 3-(5-(((1R,2R)-2-((2-hydroxyethyl)amino)cyclohexyl)oxy)-1-oxoisoindolin-2-yl)piperidine-2,6-dione;
[1811] 3-(5-(((1R,2S)-2-((2-hydroxyethyl)amino)cyclohexyl)oxy)-1-oxoisoindolin-2-yl)piperidine-2,6-dione;
[1812] 3-(5-((2-((2-hydroxyethyl)amino)cyclohexyl)oxy)-1-oxoisoindolin-2-yl)piperidine-2,6-dione;
[1813] 3-(1-oxo-5-(((1S,2S)-2-(pyrrolidin-1-yl)cyclohexyl)oxy)isoindolin-2-yl)piperidine-2,6-dione;
[1814] 3-(1-oxo-5-(((1S,2R)-2-(pyrrolidin-1-yl)cyclohexyl)oxy)isoindolin-2-yl)piperidine-2,6-dione;
[1815] 3-(1-oxo-5-(((1R,2R)-2-(pyrrolidin-1-yl)cyclohexyl)oxy)isoindolin-2-yl)piperidine-2,6-dione;
[1816] 3-(1-oxo-5-(((1R,2S)-2-(pyrrolidin-1-yl)cyclohexyl)oxy)isoindolin-2-yl)piperidine-2,6-dione;
[1817] 3-(1-oxo-5-((2-(pyrrolidin-1-yl)cyclohexyl)oxy)isoindolin-2-yl)piperidine-2,6-dione;
[1818] 3-(5-(((1S,2S)-2-morpholinocyclohexyl)oxy)-1-oxoisoindolin-2-yl)piperidine-2,6-dione;
[1819] 3-(5-(((1S,2R)-2-morpholinocyclohexyl)oxy)-1-oxoisoindolin-2-yl)piperidine-2,6-dione;
[1820] 3-(5-(((1R,2R)-2-morpholinocyclohexyl)oxy)-1-oxoisoindolin-2-yl)piperidine-2,6-dione;
[1821] 3-(5-(((1R,2S)-2-morpholinocyclohexyl)oxy)-1-oxoisoindolin-2-yl)piperidine-2,6-dione;
[1822] 3-(5-((2-morpholinocyclohexyl)oxy)-1-oxoisoindolin-2-yl)piperidine-2,6-dione;
[1823] 3-(1-oxo-5-(((1S,2S)-2-((pyridin-2-ylmethyl)amino)cyclohexyl)oxy)isoindolin-2-yl)piperidine-2,6-dione;
[1824] 3-(1-oxo-5-(((1S,2R)-2-((pyridin-2-ylmethyl)amino)cyclohexyl)oxy)isoindolin-2-yl)piperidine-2,6-dione;
[1825] 3-(1-oxo-5-(((1R,2R)-2-((pyridin-2-ylmethyl)amino)cyclohexyl)oxy)isoindolin-2-yl)piperidine-2,6-dione;
[1826] 3-(1-oxo-5-(((1R,2S)-2-((pyridin-2-ylmethyl)amino)cyclohexyl)oxy)isoindolin-2-yl)piperidine-2,6-dione;
[1827] 3-(1-oxo-5-((2-((pyridin-2-ylmethyl)amino)cyclohexyl)oxy)isoindolin-2-yl)piperidine-2,6-dione;
[1828] 3-(5-(((1S,2S)-2-((3-hydroxy-3-methylbutyl)amino)cyclohexyl)oxy)-1-oxoisoindolin-2-yl)piperidine-2,6-dione;
[1829] 3-(5-(((1S,2R)-2-((3-hydroxy-3-methylbutyl)amino)cyclohexyl)oxy)-1-oxoisoindolin-2-yl)piperidine-2,6-dione;
[1830] 3-(5-(((1R,2R)-2-((3-hydroxy-3-methylbutyl)amino)cyclohexyl)oxy)-1-oxoisoindolin-2--yl)piperidine-2,6-dione;
[1831] 3-(5-(((1R,2S)-2-((3-hydroxy-3-methylbutyl)amino)cyclohexyl)oxy)-1-oxoisoindolin-2-yl)piperidine-2,6-dione;
[1832] 3-(5-((2-((3-hydroxy-3-methylbutyl)amino)cyclohexyl)oxy)-1-oxoisoindolin-2-yl)piperidine-2,6-dione;
[1833] 3-(5-(((1S,2S)-2-(((3-methyloxetan-3-yl)methyl)amino)cyclohexyl)oxy)-1-oxoisoindolin-2-yl)piperidine-2,6-dione;
[1834] 3-(5-(((1S,2R)-2-(((3-methyloxetan-3-yl)methyl)amino)cyclohexyl)oxy)-1-oxoisoindolin-2-yl)piperidine-2,6-dione;
[1835] 3-(5-(((1R,2R)-2-(((3-methyloxetan-3-yl)methyl)amino)cyclohexyl)oxy)-1-oxoisoindolin-2-yl)piperidine-2,6-dione;
[1836] 3-(5-(((1R,2S)-2-(((3-methyloxetan-3-yl)methyl)amino)cyclohexyl)oxy)-1-oxoisoindolin-2-yl)piperidine-2,6-dione;
[1837] 3-(5-((2-(((3-methyloxetan-3-yl)methyl)amino)cyclohexyl)oxy)-1-oxoisoindolin-2-yl)piperidine-2,6-dione;
[1838] 3-(5-(((1S,2S)-2-(4-methoxy-4-methylpiperidin-1-yl)cyclohexyl)oxy)-1-oxoisoindolin-2-yl)piperidine-2,6-dione;
[1839] 3-(5-(((1S,2R)-2-(4-methoxy-4-methylpiperidin-1-yl)cyclohexyl)oxy)-1-oxoisoindolin-2-yl)piperidine-2,6-dione;
[1840] 3-(5-(((1R,2R)-2-(4-methoxy-4-methylpiperidin-1-yl)cyclohexyl)oxy)-1-oxoisoindolin-2-yl)piperidine-2,6-dione;
[1841] 3-(5-(((1R,2S)-2-(4-methoxy-4-methylpiperidin-1-yl)cyclohexyl)oxy)-1-oxoisoindolin-2-yl)piperidine-2,6-dione;
[1842] 3-(5-((2-(4-methoxy-4-methylpiperidin-1-yl)cyclohexyl)oxy)-1-oxoisoindolin-2-yl)piperidine-2,6-dione;
[1843] 3-(5-(((1S,2S)-2-(3-methoxyazetidin-1-yl)cyclohexyl)oxy)-1-oxoisoindolin-2-yl)piperidine-2,6-dione;
[1844] 3-(5-(((1S,2R)-2-(3-methoxyazetidin-1-yl)cyclohexyl)oxy)-1-oxoisoindolin-2-yl)piperidine-2,6-dione;
[1845] 3-(5-(((1R,2R)-2-(3-methoxyazetidin-1-yl)cyclohexyl)oxy)-1-oxoisoindolin-2-yl)piperidine-2,6-dione;
[1846] 3-(5-(((1R,2S)-2-(3-methoxyazetidin-1-yl)cyclohexyl)oxy)-1-oxoisoindolin-2-yl)piperidine-2,6-dione;
[1847] 3-(5-((2-(3-methoxyazetidin-1-yl)cyclohexyl)oxy)-1-oxoisoindolin-2-yl)piperidine-2,6-dione;
[1848] 3-(5-(((1S,2S)-2-(((6-methylpyridin-2-yl)methyl)amino)cyclohexyl)oxy)-1-oxoisoindolin-2-yl)piperidine-2,6-dione;
[1849] 3-(5-(((1S,2R)-2-(((6-methylpyridin-2-yl)methyl)amino)cyclohexyl)oxy)-1-oxoisoindolin-2--yl)piperidine-2,6-dione;
[1850] 3-(5-(((1R,2R)-2-(((6-methylpyridin-2-yl)methyl)amino)cyclohexyl)oxy)-1-oxoisoindolin-2-yl)piperidine-2,6-dione;
[1851] 3-(5-(((1R,2S)-2-(((6-methylpyridin-2-yl)methyl)amino)cyclohexyl)oxy)-1-oxoisoindolin-2-yl)piperidine-2,6-dione;
[1852] 3-(5-((2-(((6-methylpyridin-2-yl)methyl)amino)cyclohexyl)oxy)-1-oxoisoindolin-2-yl)piperidine-2,6-dione;
[1853] 3-(5-(((1S,2S)-2-(((5-methoxypyridin-2-yl)methyl)amino)cyclohexyl)oxy)-1-oxoisoindolin-2-yl)piperidine-2,6-dione;
[1854] 3-(5-(((1S,2R)-2-(((5-methoxypyridin-2-yl)methyl)amino)cyclohexyl)oxy)-1-oxoisoindolin-2-yl)piperidine-2,6-dione;
[1855] 3-(5-(((1R,2R)-2-(((5-methoxypyridin-2-yl)methyl)amino)cyclohexyl)oxy)-1-oxoisoindolin-2-yl)piperidine-2,6-dione;
[1856] 3-(5-(((1R,2S)-2-(((5-methoxypyridin-2-yl)methyl)amino)cyclohexyl)oxy)-1-oxoisoindolin-2-yl)piperidine-2,6-dione;
[1857] 3-(5-((2-(((5-methoxypyridin-2-yl)methyl)amino)cyclohexyl)oxy)-1-oxoisoindolin-2-yl)piperidine-2,6-dione;
[1858] 3-(5-(((1S,2S)-2-(((6-methoxypyridin-3-yl)methyl)amino)cyclohexyl)oxy)-1-oxoisoindolin-2-yl)piperidine-2,6-dione;
[1859] 3-(5-(((1S,2R)-2-(((6-methoxypyridin-3-yl)methyl)amino)cyclohexyl)oxy)-1-oxoisoindolin-2-yl)piperidine-2,6-dione;
[1860] 3-(5-(((1R,2R)-2-(((6-methoxypyridin-3-yl)methyl)amino)cyclohexyl)oxy)-1-oxoisoindolin-2-yl)piperidine-2,6-dione;
[1861] 3-(5-(((1R,2S)-2-(((6-methoxypyridin-3-yl)methyl)amino)cyclohexyl)oxy)-1-oxoisoindolin-2-yl)piperidine-2,6-dione;
[1862] 3-(5-((2-(((6-methoxypyridin-3-yl)methyl)amino)cyclohexyl)oxy)-1-oxoisoindolin-2-yl)piperidine-2,6-dione;
[1863] 3-(5-(((1S,2S)-2-((2-hydroxy-2-methylpropyl)amino)cyclohexyl)oxy)-1-oxoisoindolin-2-yl)piperidine-2,6-dione;
[1864] 3-(5-(((1S,2R)-2-((2-hydroxy-2-methylpropyl)amino)cyclohexyl)oxy)-1-oxoisoindolin-2-yl)piperidine-2,6-dione;
[1865] 3-(5-(((1R,2R)-2-((2-hydroxy-2-methylpropyl)amino)cyclohexyl)oxy)-1-oxoisoindolin-2-yl)piperidine-2,6-dione;
[1866] 3-(5-(((1R,2S)-2-((2-hydroxy-2-methylpropyl)amino)cyclohexyl)oxy)-1-oxoisoindolin-2-yl)piperidine-2,6-dione;
[1867] 3-(5-((2-((2-hydroxy-2-methylpropyl)amino)cyclohexyl)oxy)-1-oxoisoindolin-2--yl)piperidine-2,6-dione; 3-((((1S,2S)-2-((2-(2,6-dioxopiperidin-3-yl)-1-oxoisoindolin-5-yl)oxy)cyclohexyl)amino)methyl)-1-methylcyclobutane-1-carbonitrile;
[1868] 3-((((1R,2S)-2-((2-(2,6-dioxopiperidin-3-yl)-1-oxoisoindolin-5-yl)oxy)cyclohexyl)amino)methyl)-1-methylcyclobutane-1-carbonitrile;
[1869] 3-((((1R,2R)-2-((2-(2,6-dioxopiperidin-3-yl)-1-oxoisoindolin-5-yl)oxy)cyclohexyl)amino)methyl)-1-methylcyclobutane-1-carbonitrile;
[1870] 3-((((1S,2R)-2-((2-(2,6-dioxopiperidin-3-yl)-1-oxoisoindolin-5-yl)oxy)cyclohexyl)amino)methyl)-1-methylcyclobutane-1-carbonitrile;
[1871] 3-(((2-((2-(2,6-dioxopiperidin-3-yl)-1-oxoisoindolin-5-yl)oxy)cyclohexyl)amino)methyl)-1-methylcyclobutane-1-carbonitrile;
[1872] (1S,3R)-3-((((1S,2S)-2-((2-(2,6-dioxopiperidin-3-yl)-1-oxoisoindolin-5-yl)oxy)cyclohexyl)amino)methyl)-1-methylcyclobutane-1-carbonitrile;
[1873] (1R,3R)-3-((((1R,2S)-2-((2-(2,6-dioxopiperidin-3-yl)-1-oxoisoindolin-5-yl)oxy)cyclohexyl)amino)methyl)-1-methylcyclobutane-1-carbonitrile;
[1874] (1R,3R)-3-((((1R,2R)-2-((2-(2,6-dioxopiperidin-3-yl)-1-oxoisoindolin-5-yl)oxy)cyclohexyl)amino)methyl)-1-methylcyclobutane-1-carbonitrile;
[1875] (1S,3r)-3-((((1S,2R)-2-((2-(2,6-dioxopiperidin-3-yl)-1-oxoisoindolin-5-yl)oxy)cyclohexyl)amino)methyl)-1-methylcyclobutane-1-carbonitrile;
[1876] (1r,3r)-3-(((2-((2-(2,6-dioxopiperidin-3-yl)-1-oxoisoindolin-5-yl)oxy)cyclohexyl)amino)methyl)-1-methylcyclobutane-1-carbonitrile;
[1877] (1R,3S)-3-((((1S,2S)-2-((2-(2,6-dioxopiperidin-3-yl)-1-oxoisoindolin-5-yl)oxy)cyclohexyl)amino)methyl)-1-methylcyclobutane-1-carbonitrile;
[1878] (1S,3s)-3-((((1R,2S)-2-((2-(2,6-dioxopiperidin-3-yl)-1-oxoisoindolin-5-yl)oxy)cyclohexyl)amino)methyl)-1-methylcyclobutane-1-carbonitrile;
[1879] (1S,3s)-3-((((1R,2R)-2-((2-(2,6-dioxopiperidin-3-yl)-1-oxoisoindolin-5-yl)oxy)cyclohexyl)amino)methyl)-1-methylcyclobutane-1-carbonitrile;
[1880] (1R,3s)-3-((((1S,2R)-2-((2-(2,6-dioxopiperidin-3-yl)-1-oxoisoindolin-5-yl)oxy)cyclohexyl)amino)methyl)-1-methylcyclobutane-1-carbonitrile;
[1881] (1s,3s)-3-(((2-((2-(2,6-dioxopiperidin-3-yl)-1-oxoisoindolin-5-yl)oxy)cyclohexyl)amino)methyl)-1-methylcyclobutane-1-carbonitrile;
[1882] 3-(1-oxo-5-(((1S,2S)-2-(piperidin-1-yl)cyclohexyl)oxy)isoindolin-2-yl)piperidine-2,6-dione;
[1883] 3-(1-oxo-5-(((1S,2R)-2-(piperidin-1-yl)cyclohexyl)oxy)isoindolin-2-yl)piperidine-2,6-dione;
[1884] 3-(1-oxo-5-(((1R,2R)-2-(piperidin-1-yl)cyclohexyl)oxy)isoindolin-2-yl)piperidine-2,6-dione;
[1885] 3-(1-oxo-5-(((1R,2S)-2-(piperidin-1-yl)cyclohexyl)oxy)isoindolin-2-yl)piperidine-2,6-dione;
[1886] 3-(1-oxo-5-((2-(piperidin-1-yl)cyclohexyl)oxy)isoindolin-2-yl)piperidine-2,6-dione;
[1887] 3-(1-oxo-5-(((1S,2S)-2-(((tetrahydro-2H-pyran-4-yl)methyl)amino)cyclohexyl)oxy)isoindolin-2-yl)piperidine-2,6-dione;
[1888] 3-(1-oxo-5-(((1S,2R)-2-(((tetrahydro-2H-pyran-4-yl)methyl)amino)cyclohexyl)oxy)isoindolin-2-yl)piperidine-2,6-dione;
[1889] 3-(1-oxo-5-(((1R,2R)-2-(((tetrahydro-2H-pyran-4-yl)methyl)amino)cyclohexyl)oxy)isoindolin-2-yl)piperidine-2,6-dione;
[1890] 3-(1-oxo-5-(((1R,2S)-2-(((tetrahydro-2H-pyran-4-yl)methyl)amino)cyclohexyl)oxy)isoindolin-2-yl)piperidine-2,6-dione;
[1891] 3-(1-oxo-5-((2-(((tetrahydro-2H-pyran-4-yl)methyl)amino)cyclohexyl)oxy)isoindolin-2-yl)piperidine-2,6-dione;
[1892] 3-(5-(((1S,2S)-2-(((3-methoxycyclobutyl)methyl)amino)cyclohexyl)oxy)-1-oxoisoindolin-2-yl)piperidine-2,6-dione;
[1893] 3-(5-(((1S,2R)-2-(((3-methoxycyclobutyl)methyl)amino)cyclohexyl)oxy)-1-oxoisoindolin-2-yl)piperidine-2,6-dione;
[1894] 3-(5-(((1R,2R)-2-(((3-methoxycyclobutyl)methyl)amino)cyclohexyl)oxy)-1-oxoisoindolin-2-yl)piperidine-2,6-dione;
[1895] 3-(5-(((1R,2S)-2-(((3-methoxycyclobutyl)methyl)amino)cyclohexyl)oxy)-1-oxoisoindolin-2-yl)piperidine-2,6-dione;
[1896] 3-(5-((2-(((3-methoxycyclobutyl)methyl)amino)cyclohexyl)oxy)-1-oxoisoindolin-2-yl)piperidine-2,6-dione;
[1897] 3-(5-(((1S,2S)-2-((((1S,3R)-3-methoxycyclobutyl)methyl)amino)cyclohexyl)oxy)-1-oxoisoindolin-2-yl)piperidine-2,6-dione;
[1898] 3-(5-(((1S,2R)-2-((((1s,3S)-3-methoxycyclobutyl)methyl)amino)cyclohexyl)oxy)-1-oxoisoindolin-2-yl)piperidine-2,6-dione;
[1899] 3-(5-(((1R,2R)-2-((((1s,3S)-3-methoxycyclobutyl)methyl)amino)cyclohexyl)oxy)-1-oxoisoindolin-2-yl)piperidine-2,6-dione;
[1900] 3-(5-(((1R,2S)-2-((((1s,3R)-3-methoxycyclobutyl)methyl)amino)cyclohexyl)oxy)-1-oxoisoindolin-2-yl)piperidine-2,6-dione;
[1901] 3-(5-((2-((((1s,3s)-3-methoxycyclobutyl)methyl)amino)cyclohexyl)oxy)-1-oxoisoindolin-2-yl)piperidine-2,6-dione;
[1902] 3-(5-(((1S,2S)-2-(((cis-3-methoxycyclobutyl)methyl)amino)cyclohexyl)oxy)-1-oxoisoindolin-2-yl)piperidine-2,6-dione;
[1903] 3-(5-(((1S,2R)-2-(((cis-3-methoxycyclobutyl)methyl)amino)cyclohexyl)oxy)-1-oxoisoindolin-2-yl)piperidine-2,6-dione;
[1904] 3-(5-(((1R,2R)-2-(((cis-3-methoxycyclobutyl)methyl)amino)cyclohexyl)oxy)-1-oxoisoindolin-2-yl)piperidine-2,6-dione;
[1905] 3-(5-(((1R,2S)-2-(((cis-3-methoxycyclobutyl)methyl)amino)cyclohexyl)oxy)-1-oxoisoindolin-2-yl)piperidine-2,6-dione;
[1906] 3-(5-((2-(((cis-3-methoxycyclobutyl)methyl)amino)cyclohexyl)oxy)-1-oxoisoindolin-2-yl)piperidine-2,6-dione;
[1907] 3-(5-(((1S,2S)-2-((((1R,3S)-3-methoxycyclobutyl)methyl)amino)cyclohexyl)oxy)-1-oxoisoindolin-2-yl)piperidine-2,6-dione;
[1908] 3-(5-(((1S,2R)-2-((((1s,3S)-3-methoxycyclobutyl)methyl)amino)cyclohexyl)oxy)-1-oxoisoindolin-2-yl)piperidine-2,6-dione;
[1909] 3-(5-(((1R,2R)-2-((((1s,3S)-3-methoxycyclobutyl)methyl)amino)cyclohexyl)oxy)-1-oxoisoindolin-2-yl)piperidine-2,6-dione;
[1910] 3-(5-(((1R,2S)-2-((((1s,3R)-3-methoxycyclobutyl)methyl)amino)cyclohexyl)oxy)-1-oxoisoindolin-2-yl)piperidine-2,6-dione;
[1911] 3-(5-((2-((((1s,3s)-3-methoxycyclobutyl)methyl)amino)cyclohexyl)oxy)-1-oxoisoindolin-2-yl)piperidine-2,6-dione;
[1912] 3-(5-(((1S,2S)-2-(((trans-3-methoxycyclobutyl)methyl)amino)cyclohexyl)oxy)-1-oxoisoindolin-2-yl)piperidine-2,6-dione;
[1913] 3-(5-(((1S,2R)-2-(((trans-3-methoxycyclobutyl)methyl)amino)cyclohexyl)oxy)-1-oxoisoindolin-2-yl)piperidine-2,6-dione;
[1914] 3-(5-(((1R,2R)-2-(((trans-3-methoxycyclobutyl)methyl)amino)cyclohexyl)oxy)-1-oxoisoindolin-2-yl)piperidine-2,6-dione;
[1915] 3-(5-(((1R,2S)-2-(((trans-3-methoxycyclobutyl)methyl)amino)cyclohexyl)oxy)-1-oxoisoindolin-2-yl)piperidine-2,6-dione;
[1916] 3-(5-((2-(((trans-3-methoxycyclobutyl)methyl)amino)cyclohexyl)oxy)-1-oxoisoindolin-2-yl)piperidine-2,6-dione;
[1917] 3-(5-(((1S,2S)-2-((((1r,4S)-4-methoxycyclohexyl)methyl)amino)cyclohexyl)oxy)-1-oxoisoindolin-2-yl)piperidine-2,6-dione;
[1918] 3-(5-(((1S,2R)-2-((((1r,4R)-4-methoxycyclohexyl)methyl)amino)cyclohexyl)oxy)-1-oxoisoindolin-2-yl)piperidine-2,6-dione;
[1919] 3-(5-(((1R,2R)-2-((((1r,4R)-4-methoxycyclohexyl)methyl)amino)cyclohexyl)oxy)-1-oxoisoindolin-2-yl)piperidine-2,6-dione;
[1920] 3-(5-(((1R,2S)-2-((((1r,4S)-4-methoxycyclohexyl)methyl)amino)cyclohexyl)oxy)-1-oxoisoindolin-2-yl)piperidine-2,6-dione;
[1921] 3-(5-((2-((((1r,4r)-4-methoxycyclohexyl)methyl)amino)cyclohexyl)oxy)-1-oxoisoindolin-2-yl)piperidine-2,6-dione;
[1922] 3-(5-(((1S,2S)-2-(((4-methyltetrahydro-2H-pyran-4-yl)methyl)amino)cyclohexyl)oxy)-1-oxoisoindolin-2-yl)piperidine-2,6-dione;
[1923] 3-(5-(((1S,2R)-2-(((4-methyltetrahydro-2H-pyran-4-yl)methyl)amino)cyclohexyl)oxy)-1-oxoisoindolin-2-yl)piperidine-2,6-dione;
[1924] 3-(5-(((1R,2R)-2-(((4-methyltetrahydro-2H-pyran-4-yl)methyl)amino)cyclohexyl)oxy)-1-oxoisoindolin-2-yl)piperidine-2,6-dione;
[1925] 3-(5-(((1R,2S)-2-(((4-methyltetrahydro-2H-pyran-4-yl)methyl)amino)cyclohexyl)oxy)-1-oxoisoindolin-2-yl)piperidine-2,6-dione;
[1926] 3-(5-((2-(((4-methyltetrahydro-2H-pyran-4-yl)methyl)amino)cyclohexyl)oxy)-1-oxoisoindolin-2-yl)piperidine-2,6-dione;
[1927] 3-(1-oxo-5-(((1S,2S)-2-((pyrimidin-5-ylmethyl)amino)cyclohexyl)oxy)isoindolin-2-yl)piperidine-2,6-dione;
[1928] 3-(1-oxo-5-(((1S,2R)-2-((pyrimidin-5-ylmethyl)amino)cyclohexyl)oxy)isoindolin-2-yl)piperidine-2,6-dione;
[1929] 3-(1-oxo-5-(((1R,2R)-2-((pyrimidin-5-ylmethyl)amino)cyclohexyl)oxy)isoindolin-2-yl)piperidine-2,6-dione;
[1930] 3-(1-oxo-5-(((1R,2S)-2-((pyrimidin-5-ylmethyl)amino)cyclohexyl)oxy)isoindolin-2-yl)piperidine-2,6-dione;
[1931] 3-(1-oxo-5-((2-((pyrimidin-5-ylmethyl)amino)cyclohexyl)oxy)isoindolin-2-yl)piperidine-2,6-dione;
[1932] 3-(1-oxo-5-(((1S,2S)-2-((2-(tetrahydro-2H-pyran-4-yl)ethyl)amino)cyclohexyl)oxy)isoindolin-2-yl)piperidine-2,6-dione;
[1933] 3-(1-oxo-5-(((1S,2R)-2-((2-(tetrahydro-2H-pyran-4-yl)ethyl)amino)cyclohexyl)oxy)isoindolin-2-yl)piperidine-2,6-dione;
[1934] 3-(1-oxo-5-(((1R,2R)-2-((2-(tetrahydro-2H-pyran-4-yl)ethyl)amino)cyclohexyl)oxy)isoindolin-2-yl)piperidine-2,6-dione;
[1935] 3-(1-oxo-5-(((1R,2S)-2-((2-(tetrahydro-2H-pyran-4-yl)ethyl)amino)cyclohexyl)oxy)isoindolin-2-yl)piperidine-2,6-dione;
[1936] 3-(1-oxo-5-((2-((2-(tetrahydro-2H-pyran-4-yl)ethyl)amino)cyclohexyl)oxy)isoindolin-2-yl)piperidine-2,6-dione;
[1937] 3-(5-(((1S,2S)-2-(2-oxa-7-azaspiro[3.5]nonan-7-yl)cyclohexyl)oxy)-1-oxoisoindolin-2-yl)piperidine-2,6-dione;
[1938] 3-(5-(((1S,2R)-2-(2-oxa-7-azaspiro[3.5]nonan-7-yl)cyclohexyl)oxy)-1-oxoisoindolin-2-yl)piperidine-2,6-dione;
[1939] 3-(5-(((1R,2R)-2-(2-oxa-7-azaspiro[3.5]nonan-7-yl)cyclohexyl)oxy)-1-oxoisoindolin-2-yl)piperidine-2,6-dione;
[1940] 3-(5-(((1R,2S)-2-(2-oxa-7-azaspiro[3.5]nonan-7-yl)cyclohexyl)oxy)-1-oxoisoindolin-2-yl)piperidine-2,6-dione;
[1941] 3-(5-((2-(2-oxa-7-azaspiro[3.5]nonan-7-yl)cyclohexyl)oxy)-1-oxoisoindolin-2-yl)piperidine-2,6-dione;
[1942] 3-(5-(((1S,2S)-2-(((4-methoxytetrahydro-2H-pyran-4-yl)methyl)amino)cyclohexyl)oxy)-1-oxoisoindolin-2-yl)piperidine-2,6-dione;
[1943] 3-(5-(((1S,2R)-2-(((4-methoxytetrahydro-2H-pyran-4-yl)methyl)amino)cyclohexyl)oxy)-1-oxoisoindolin-2-yl)piperidine-2,6-dione;
[1944] 3-(5-(((1R,2R)-2-(((4-methoxytetrahydro-2H-pyran-4-yl)methyl)amino)cyclohexyl)oxy)-1-oxoisoindolin-2-yl)piperidine-2,6-dione;
[1945] 3-(5-(((1R,2S)-2-(((4-methoxytetrahydro-2H-pyran-4-yl)methyl)amino)cyclohexyl)oxy)-1-oxoisoindolin-2-yl)piperidine-2,6-dione;
[1946] 3-(5-((2-(((4-methoxytetrahydro-2H-pyran-4-yl)methyl)amino)cyclohexyl)oxy)-1-oxoisoindolin-2-yl)piperidine-2,6-dione;
[1947] 3-(5-(((1S,2S)-2-(((2,2-dimethyltetrahydro-2H-pyran-4-yl)methyl)amino)cyclohexyl)oxy)-1-oxoisoindolin-2-yl)piperidine-2,6-dione;
[1948] 3-(5-(((1S,2R)-2-(((2,2-dimethyltetrahydro-2H-pyran-4-yl)methyl)amino)cyclohexyl)oxy)-1-oxoisoindolin-2-yl)piperidine-2,6-dione;
[1949] 3-(5-(((1R,2R)-2-(((2,2-dimethyltetrahydro-2H-pyran-4-yl)methyl)amino)cyclohexyl)oxy)-1-oxoisoindolin-2-yl)piperidine-2,6-dione;
[1950] 3-(5-(((1R,2S)-2-(((2,2-dimethyltetrahydro-2H-pyran-4-yl)methyl)amino)cyclohexyl)oxy)-1-oxoisoindolin-2-yl)piperidine-2,6-dione;
[1951] 3-(5-((2-(((2,2-dimethyltetrahydro-2H-pyran-4-yl)methyl)amino)cyclohexyl)oxy)-1-oxoisoindolin-2-yl)piperidine-2,6-dione;
[1952] 3-(5-(((1S,2S)-2-((7-oxaspiro[3.5]nonan-2-yl)amino)cyclohexyl)oxy)-1-oxoisoindolin-2-yl)piperidine-2,6-dione;
[1953] 3-(5-(((1S,2R)-2-((7-oxaspiro[3.5]nonan-2-yl)amino)cyclohexyl)oxy)-1-oxoisoindolin-2-yl)piperidine-2,6-dione;
[1954] 3-(5-(((1R,2R)-2-((7-oxaspiro[3.5]nonan-2-yl)amino)cyclohexyl)oxy)-1-oxoisoindolin-2-yl)piperidine-2,6-dione;
[1955] 3-(5-(((1R,2S)-2-((7-oxaspiro[3.5]nonan-2-yl)amino)cyclohexyl)oxy)-1-oxoisoindolin-2-yl)piperidine-2,6-dione;
[1956] 3-(5-((2-((7-oxaspiro[3.5]nonan-2-yl)amino)cyclohexyl)oxy)-1-oxoisoindolin-2-yl)piperidine-2,6-dione;
[1957] 1-((((1S,2S)-2-((2-(2,6-dioxopiperidin-3-yl)-1-oxoisoindolin-5-yl)oxy)cyclohexyl)amino)methyl)cyclobutane-1-carbonitrile;
[1958] 1-((((1R,2S)-2-((2-(2,6-dioxopiperidin-3-yl)-1-oxoisoindolin-5-yl)oxy)cyclohexyl)amino)methyl)cyclobutane-1-carbonitrile;
[1959] 1-((((1R,2R)-2-((2-(2,6-dioxopiperidin-3-yl)-1-oxoisoindolin-5-yl)oxy)cyclohexyl)amino)methyl)cyclobutane-1-carbonitrile;
[1960] 1-((((1S,2R)-2-((2-(2,6-dioxopiperidin-3-yl)-1-oxoisoindolin-5-yl)oxy)cyclohexyl)amino)methyl)cyclobutane-1-carbonitrile;
[1961] 1-(((2-((2-(2,6-dioxopiperidin-3-yl)-1-oxoisoindolin-5-yl)oxy)cyclohexyl)amino)methyl)cyclobutane-1-carbonitrile;
[1962] 3-(5-(((1S,2S)-2-(3-(2-chlorophenoxy)azetidin-1-yl)cyclohexyl)oxy)-1-oxoisoindolin-2-yl)piperidine-2,6-dione;
[1963] 3-(5-(((1S,2R)-2-(3-(2-chlorophenoxy)azetidin-1-yl)cyclohexyl)oxy)-1-oxoisoindolin-2-yl)piperidine-2,6-dione;
[1964] 3-(5-(((1R,2R)-2-(3-(2-chlorophenoxy)azetidin-1-yl)cyclohexyl)oxy)-1-oxoisoindolin-2-yl)piperidine-2,6-dione;
[1965] 3-(5-(((1R,2S)-2-(3-(2-chlorophenoxy)azetidin-1-yl)cyclohexyl)oxy)-1-oxoisoindolin-2-yl)piperidine-2,6-dione;
[1966] 3-(5-((2-(3-(2-chlorophenoxy)azetidin-1-yl)cyclohexyl)oxy)-1-oxoisoindolin-2-yl)piperidine-2,6-dione;
[1967] 3-(5-(((1S,2S)-2-(3-(2-methoxyphenoxy)azetidin-1-yl)cyclohexyl)oxy)-1-oxoisoindolin-2-yl)piperidine-2,6-dione;
[1968] 3-(5-(((1S,2R)-2-(3-(2-methoxyphenoxy)azetidin-1-yl)cyclohexyl)oxy)-1-oxoisoindolin-2-yl)piperidine-2,6-dione;
[1969] 3-(5-(((1R,2R)-2-(3-(2-methoxyphenoxy)azetidin-1-yl)cyclohexyl)oxy)-1-oxoisoindolin-2-yl)piperidine-2,6-dione;
[1970] 3-(5-(((1R,2S)-2-(3-(2-methoxyphenoxy)azetidin-1-yl)cyclohexyl)oxy)-1-oxoisoindolin-2-yl)piperidine-2,6-dione;
[1971] 3-(5-((2-(3-(2-methoxyphenoxy)azetidin-1-yl)cyclohexyl)oxy)-1-oxoisoindolin-2-yl)piperidine-2,6-dione;
[1972] 3-(1-oxo-5-(((1S,2S)-2-((pyrazolo[1,5-a]pyrimidin-6-ylmethyl)amino)cyclohexyl)oxy)isoindolin-2-yl)piperidine-2,6-dione;
[1973] 3-(1-oxo-5-(((1S,2R)-2-((pyrazolo[1,5-a]pyrimidin-6-ylmethyl)amino)cyclohexyl)oxy)isoindolin-2-yl)piperidine-2,6-dione;
[1974] 3-(1-oxo-5-(((1R,2R)-2-((pyrazolo[1,5-a]pyrimidin-6-ylmethyl)amino)cyclohexyl)oxy)isoindolin-2-yl)piperidine-2,6-dione;
[1975] 3-(1-oxo-5-(((1R,2S)-2-((pyrazolo[1,5-a]pyrimidin-6-ylmethyl)amino)cyclohexyl)oxy)isoindolin-2-yl)piperidine-2,6-dione;
[1976] 3-(1-oxo-5-((2-((pyrazolo[1,5-a]pyrimidin-6-ylmethyl)amino)cyclohexyl)oxy)isoindolin-2-yl)piperidine-2,6-dione;
[1977] 3-(5-(((1S,2S)-2-((4,4-difluorocyclohexyl)amino)cyclohexyl)oxy)-1-oxoisoindolin-2--yl)piperidine-2,6-dione;
[1978] 3-(5-(((1S,2R)-2-((4,4-difluorocyclohexyl)amino)cyclohexyl)oxy)-1-oxoisoindolin-2-yl)piperidine-2,6-dione;
[1979] 3-(5-(((1R,2R)-2-((4,4-difluorocyclohexyl)amino)cyclohexyl)oxy)-1-oxoisoindolin-2-yl)piperidine-2,6-dione;
[1980] 3-(5-(((1R,2S)-2-((4,4-difluorocyclohexyl)amino)cyclohexyl)oxy)-1-oxoisoindolin-2-yl)piperidine-2,6-dione;
[1981] 3-(5-((2-((4,4-difluorocyclohexyl)amino)cyclohexyl)oxy)-1-oxoisoindolin-2-yl)piperidine-2,6-dione;
[1982] 3-(5-(((1S,2S)-2-((2,4-difluorobenzyl)amino)cyclohexyl)oxy)-1-oxoisoindolin-2-yl)piperidine-2,6-dione;
[1983] 3-(5-(((1S,2R)-2-((2,4-difluorobenzyl)amino)cyclohexyl)oxy)-1-oxoisoindolin-2-yl)piperidine-2,6-dione;
[1984] 3-(5-(((1R,2R)-2-((2,4-difluorobenzyl)amino)cyclohexyl)oxy)-1-oxoisoindolin-2-yl)piperidine-2,6-dione;
[1985] 3-(5-(((1R,2S)-2-((2,4-difluorobenzyl)amino)cyclohexyl)oxy)-1-oxoisoindolin-2-yl)piperidine-2,6-dione;
[1986] 3-(5-((2-((2,4-difluorobenzyl)amino)cyclohexyl)oxy)-1-oxoisoindolin-2-yl)piperidine-2,6-dione;
[1987] 3-(5-(((1S,2S)-2-((2-methoxycyclopentyl)amino)cyclohexyl)oxy)-1-oxoisoindolin-2-yl)piperidine-2,6-dione;
[1988] 3-(5-(((1S,2R)-2-((2-methoxycyclopentyl)amino)cyclohexyl)oxy)-1-oxoisoindolin-2-yl)piperidine-2,6-dione;
[1989] 3-(5-(((1R,2R)-2-((2-methoxycyclopentyl)amino)cyclohexyl)oxy)-1-oxoisoindolin-2-yl)piperidine-2,6-dione;
[1990] 3-(5-(((1R,2S)-2-((2-methoxycyclopentyl)amino)cyclohexyl)oxy)-1-oxoisoindolin-2-yl)piperidine-2,6-dione;
[1991] 3-(5-((2-((2-methoxycyclopentyl)amino)cyclohexyl)oxy)-1-oxoisoindolin-2-yl)piperidine-2,6-dione;
[1992] 3-(5-(((1S,2S)-2-(((1R,2R)-2-methoxycyclopentyl)amino)cyclohexyl)oxy)-1-oxoisoindolin-2-yl)piperidine-2,6-dione;
[1993] 3-(5-(((1S,2R)-2-(((1R,2R)-2-methoxycyclopentyl)amino)cyclohexyl)oxy)-1-oxoisoindolin-2-yl)piperidine-2,6-dione;
[1994] 3-(5-(((1R,2R)-2-(((1R,2R)-2-methoxycyclopentyl)amino)cyclohexyl)oxy)-1-oxoisoindolin-2-yl)piperidine-2,6-dione;
[1995] 3-(5-(((1R,2S)-2-(((1R,2R)-2-methoxycyclopentyl)amino)cyclohexyl)oxy)-1-oxoisoindolin-2-yl)piperidine-2,6-dione;
[1996] 3-(5-((2-(((1R,2R)-2-methoxycyclopentyl)amino)cyclohexyl)oxy)-1-oxoisoindolin-2-yl)piperidine-2,6-dione;
[1997] 3-(5-(((1S,2S)-2-(((1S,2S)-2-methoxycyclopentyl)amino)cyclohexyl)oxy)-1-oxoisoindolin-2-yl)piperidine-2,6-dione;
[1998] 3-(5-(((1S,2R)-2-(((1S,2S)-2-methoxycyclopentyl)amino)cyclohexyl)oxy)-1-oxoisoindolin-2-yl)piperidine-2,6-dione;
[1999] 3-(5-(((1R,2R)-2-(((1S,2S)-2-methoxycyclopentyl)amino)cyclohexyl)oxy)-1-oxoisoindolin-2-yl)piperidine-2,6-dione;
[2000] 3-(5-(((1R,2S)-2-(((1S,2S)-2-methoxycyclopentyl)amino)cyclohexyl)oxy)-1-oxoisoindolin-2-yl)piperidine-2,6-dione;
[2001] 3-(5-((2-(((1S,2S)-2-methoxycyclopentyl)amino)cyclohexyl)oxy)-1-oxoisoindolin-2-yl)piperidine-2,6-dione;
[2002] 3-((((1S,2S)-2-((2-(2,6-dioxopiperidin-3-yl)-1-oxoisoindolin-5-yl)oxy)cyclohexyl)amino)methyl)bicyclo[1.1.1]pentane-1-carbonitrile;
[2003] 3-((((1R,2S)-2-((2-(2,6-dioxopiperidin-3-yl)-1-oxoisoindolin-5-yl)oxy)cyclohexyl)amino)methyl)bicyclo[1.1.1]pentane-1-carbonitrile;
[2004] 3-((((1R,2R)-2-((2-(2,6-dioxopiperidin-3-yl)-1-oxoisoindolin-5-yl)oxy)cyclohexyl)amino)methyl)bicyclo[1.1.1]pentane-1-carbonitrile;
[2005] 3-((((1S,2R)-2-((2-(2,6-dioxopiperidin-3-yl)-1-oxoisoindolin-5-yl)oxy)cyclohexyl)amino)methyl)bicyclo[1.1.1]pentane-1-carbonitrile; 3-(((2-((2-(2,6-dioxopiperidin-3-yl)-1-oxoisoindolin-5-yl)oxy)cyclohexyl)amino)methyl)bicyclo[1.1.1]pentane-1-carbonitrile;
[2006] 3-(5-(((1S,2S)-2-(3-(3-fluorophenoxy)azetidin-1-yl)cyclohexyl)oxy)-1-oxoisoindolin-2-yl)piperidine-2,6-dione;
[2007] 3-(5-(((1S,2R)-2-(3-(3-fluorophenoxy)azetidin-1-yl)cyclohexyl)oxy)-1-oxoisoindolin-2-yl)piperidine-2,6-dione;
[2008] 3-(5-(((1R,2R)-2-(3-(3-fluorophenoxy)azetidin-1-yl)cyclohexyl)oxy)-1-oxoisoindolin-2-yl)piperidine-2,6-dione;
[2009] 3-(5-(((1R,2S)-2-(3-(3-fluorophenoxy)azetidin-1-yl)cyclohexyl)oxy)-1-oxoisoindolin-2-yl)piperidine-2,6-dione;
[2010] 3-(5-((2-(3-(3-fluorophenoxy)azetidin-1-yl)cyclohexyl)oxy)-1-oxoisoindolin-2-yl)piperidine-2,6-dione;
[2011] 3-(5-(((1S,2S)-2-(((3,3-difluorocyclobutyl)methyl)amino)cyclohexyl)oxy)-1-oxoisoindolin-2-yl)piperidine-2,6-dione;
[2012] 3-(5-(((1S,2R)-2-(((3,3-difluorocyclobutyl)methyl)amino)cyclohexyl)oxy)-1-oxoisoindolin-2--yl)piperidine-2,6-dione;
[2013] 3-(5-(((1R,2R)-2-(((3,3-difluorocyclobutyl)methyl)amino)cyclohexyl)oxy)-1-oxoisoindolin-2-yl)piperidine-2,6-dione;
[2014] 3-(5-(((1R,2S)-2-(((3,3-difluorocyclobutyl)methyl)amino)cyclohexyl)oxy)-1-oxoisoindolin-2-yl)piperidine-2,6-dione;
[2015] 3-(5-((2-(((3,3-difluorocyclobutyl)methyl)amino)cyclohexyl)oxy)-1-oxoisoindolin-2-yl)piperidine-2,6-dione;
[2016] 3-(5-(((1S,2S)-2-((((1S,4R)-4-methoxycyclohexyl)methyl)amino)cyclohexyl)oxy)-1-oxoisoindolin-2-yl)piperidine-2,6-dione;
[2017] 3-(5-(((1S,2R)-2-((((1s,4S)-4-methoxycyclohexyl)methyl)amino)cyclohexyl)oxy)-1-oxoisoindolin-2-yl)piperidine-2,6-dione;
[2018] 3-(5-(((1R,2R)-2-((((1s,4S)-4-methoxycyclohexyl)methyl)amino)cyclohexyl)oxy)-1-oxoisoindolin-2-yl)piperidine-2,6-dione;
[2019] 3-(5-(((1R,2S)-2-((((1s,4R)-4-methoxycyclohexyl)methyl)amino)cyclohexyl)oxy)-1-oxoisoindolin-2-yl)piperidine-2,6-dione;
[2020] 3-(5-((2-((((1s,4s)-4-methoxycyclohexyl)methyl)amino)cyclohexyl)oxy)-1-oxoisoindolin-2-yl)piperidine-2,6-dione;
[2021] 3-(5-(((1S,2S)-2-(((4-methoxycyclohexyl)methyl)amino)cyclohexyl)oxy)-1-oxoisoindolin-2-yl)piperidine-2,6-dione;
[2022] 3-(5-(((1S,2S)-2-(((cis-4-methoxycyclohexyl)methyl)amino)cyclohexyl)oxy)-1-oxoisoindolin-2-yl)piperidine-2,6-dione;
[2023] 3-(5-(((1S,2S)-2-(((trans-4-methoxycyclohexyl)methyl)amino)cyclohexyl)oxy)-1-oxoisoindolin-2-yl)piperidine-2,6-dione;
[2024] 3-(5-(((1S,2S)-2-(bis(((1R,4S)-4-methoxycyclohexyl)methyl)amino)cyclohexyl)oxy)-1-oxoisoindolin-2-yl)piperidine-2,6-dione;
[2025] 3-(5-(((1S,2R)-2-(bis(((1r,4R)-4-methoxycyclohexyl)methyl)amino)cyclohexyl)oxy)-1-oxoisoindolin-2-yl)piperidine-2,6-dione;
[2026] 3-(5-(((1R,2R)-2-(bis(((1r,4R)-4-methoxycyclohexyl)methyl)amino)cyclohexyl)oxy)-1-oxoisoindolin-2-yl)piperidine-2,6-dione;
[2027] 3-(5-(((1R,2S)-2-(bis(((1r,4S)-4-methoxycyclohexyl)methyl)amino)cyclohexyl)oxy)-1-oxoisoindolin-2-yl)piperidine-2,6-dione;
[2028] 3-(5-((2-(bis(((1r,4R)-4-methoxycyclohexyl)methyl)amino)cyclohexyl)oxy)-1-oxoisoindolin-2-yl)piperidine-2,6-dione;
[2029] 4-((((1S,2S)-2-((2-(2,6-dioxopiperidin-3-yl)-1-oxoisoindolin-5-yl)oxy)cyclohexyl)amino)methyl)benzonitrile;
[2030] 4-((((1R,2S)-2-((2-(2,6-dioxopiperidin-3-yl)-1-oxoisoindolin-5-yl)oxy)cyclohexyl)amino)methyl)benzonitrile;
[2031] 4-((((1R,2R)-2-((2-(2,6-dioxopiperidin-3-yl)-1-oxoisoindolin-5-yl)oxy)cyclohexyl)amino)methyl)benzonitrile;
[2032] 4-((((1S,2R)-2-((2-(2,6-dioxopiperidin-3-yl)-1-oxoisoindolin-5-yl)oxy)cyclohexyl)amino)methyl)benzonitrile;
[2033] 4-(((2-((2-(2,6-dioxopiperidin-3-yl)-1-oxoisoindolin-5-yl)oxy)cyclohexyl)amino)methyl)benzonitrile;
[2034] 4-((((1S,2S)-2-((2-(2,6-dioxopiperidin-3-yl)-1-oxoisoindolin-5-yl)oxy)cyclohexyl)(methyl)amino)methyl)benzonitrile;
[2035] 4-((((1R,2S)-2-((2-(2,6-dioxopiperidin-3-yl)-1-oxoisoindolin-5-yl)oxy)cyclohexyl)(methyl)amino)methyl)benzonitrile;
[2036] 4-((((1R,2R)-2-((2-(2,6-dioxopiperidin-3-yl)-1-oxoisoindolin-5-yl)oxy)cyclohexyl)(methyl)amino)methyl)benzonitrile;
[2037] 4-((((1S,2R)-2-((2-(2,6-dioxopiperidin-3-yl)-1-oxoisoindolin-5-yl)oxy)cyclohexyl)(methyl)amino)methyl)benzonitrile;
[2038] 4-(((2-((2-(2,6-dioxopiperidin-3-yl)-1-oxoisoindolin-5-yl)oxy)cyclohexyl)(methyl)amino)methyl)benzonitrile;
[2039] 3-(5-(((1S,2S)-2-(((3-fluorobicyclo[1.1.1]pentan-1-yl)methyl)amino)cyclohexyl)oxy)-1-oxoisoindolin-2-yl)piperidine-2,6-dione;
[2040] 3-(5-(((1S,2R)-2-(((3-fluorobicyclo[1.1.1]pentan-1-yl)methyl)amino)cyclohexyl)oxy)-1-oxoisoindolin-2-yl)piperidine-2,6-dione;
[2041] 3-(5-(((1R,2R)-2-(((3-fluorobicyclo[1.1.1]pentan-1-yl)methyl)amino)cyclohexyl)oxy)-1-oxoisoindolin-2-yl)piperidine-2,6-dione;
[2042] 3-(5-(((1R,2S)-2-(((3-fluorobicyclo[1.1.1]pentan-1-yl)methyl)amino)cyclohexyl)oxy)-1-oxoisoindolin-2-yl)piperidine-2,6-dione;
[2043] 3-(5-((2-(((3-fluorobicyclo[1.1.1]pentan-1-yl)methyl)amino)cyclohexyl)oxy)-1-oxoisoindolin-2-yl)piperidine-2,6-dione;
[2044] 3-(5-((2-(3,3-difluoropyrrolidin-1-yl)cyclohexyl)oxy)-1-oxoisoindolin-2-yl)piperidine-2,6-dione;
[2045] 3-(5-(((1S,2S)-2-(3,3-difluoropyrrolidin-1-yl)cyclohexyl)oxy)-1-oxoisoindolin-2-yl)piperidine-2,6-dione;
[2046] 3-(5-(((1S,2R)-2-(3,3-difluoropyrrolidin-1-yl)cyclohexyl)oxy)-1-oxoisoindolin-2-yl)piperidine-2,6-dione;
[2047] 3-(5-(((1R,2R)-2-(3,3-difluoropyrrolidin-1-yl)cyclohexyl)oxy)-1-oxoisoindolin-2-yl)piperidine-2,6-dione;
[2048] 3-(5-(((1R,2S)-2-(3,3-difluoropyrrolidin-1-yl)cyclohexyl)oxy)-1-oxoisoindolin-2-yl)piperidine-2,6-dione;
[2049] 3-(5-(((1S,2S)-2-(ethylamino)cycloheptyl)oxy)-1-oxoisoindolin-2-yl)piperidine-2,6-dione;
[2050] 3-(5-(((1S,2R)-2-(ethylamino)cycloheptyl)oxy)-1-oxoisoindolin-2-yl)piperidine-2,6-dione;
[2051] 3-(5-(((1R,2R)-2-(ethylamino)cycloheptyl)oxy)-1-oxoisoindolin-2-yl)piperidine-2,6-dione;
[2052] 3-(5-(((1R,2S)-2-(ethylamino)cycloheptyl)oxy)-1-oxoisoindolin-2-yl)piperidine-2,6-dione;
[2053] 3-(5-((2-(ethylamino)cycloheptyl)oxy)-1-oxoisoindolin-2-yl)piperidine-2,6-dione;
[2054] 3-(5-(((1S,2S)-2-(benzylamino)cycloheptyl)oxy)-1-oxoisoindolin-2-yl)piperidine-2,6-dione;
[2055] 3-(5-(((1S,2R)-2-(benzylamino)cycloheptyl)oxy)-1-oxoisoindolin-2-yl)piperidine-2,6-dione;
[2056] 3-(5-(((1R,2R)-2-(benzylamino)cycloheptyl)oxy)-1-oxoisoindolin-2-yl)piperidine-2,6-dione;
[2057] 3-(5-(((1R,2S)-2-(benzylamino)cycloheptyl)oxy)-1-oxoisoindolin-2-yl)piperidine-2,6-dione;
[2058] 3-(5-((2-(benzylamino)cycloheptyl)oxy)-1-oxoisoindolin-2-yl)piperidine-2,6-dione;
[2059] 3-(5-(((1S,2S)-2-(diethylamino)cycloheptyl)oxy)-1-oxoisoindolin-2-yl)piperidine-2,6-dione;
[2060] 3-(5-(((1S,2R)-2-(diethylamino)cycloheptyl)oxy)-1-oxoisoindolin-2-yl)piperidine-2,6-dione;
[2061] 3-(5-(((1R,2R)-2-(diethylamino)cycloheptyl)oxy)-1-oxoisoindolin-2-yl)piperidine-2,6-dione;
[2062] 3-(5-(((1R,2S)-2-(diethylamino)cycloheptyl)oxy)-1-oxoisoindolin-2-yl)piperidine-2,6-dione;
[2063] 3-(5-((2-(diethylamino)cycloheptyl)oxy)-1-oxoisoindolin-2-yl)piperidine-2,6-dione;
[2064] 3-(5-(((1S,2S)-2-(4-methoxy-4-methylpiperidin-1-yl)cycloheptyl)oxy)-1-oxoisoindolin-2-yl)piperidine-2,6-dione;
[2065] 3-(5-(((1S,2R)-2-(4-methoxy-4-methylpiperidin-1-yl)cycloheptyl)oxy)-1-oxoisoindolin-2-yl)piperidine-2,6-dione;
[2066] 3-(5-(((1R,2R)-2-(4-methoxy-4-methylpiperidin-1-yl)cycloheptyl)oxy)-1-oxoisoindolin-2-yl)piperidine-2,6-dione;
[2067] 3-(5-(((1R,2S)-2-(4-methoxy-4-methylpiperidin-1-yl)cycloheptyl)oxy)-1-oxoisoindolin-2-yl)piperidine-2,6-dione;
[2068] 3-(5-((2-(4-methoxy-4-methylpiperidin-1-yl)cycloheptyl)oxy)-1-oxoisoindolin-2-yl)piperidine-2,6-dione;
[2069] 3-(5-(((1S,2S)-2-(isobutylamino)cycloheptyl)oxy)-1-oxoisoindolin-2-yl)piperidine-2,6-dione;
[2070] 3-(5-(((1S,2R)-2-(isobutylamino)cycloheptyl)oxy)-1-oxoisoindolin-2-yl)piperidine-2,6-dione;
[2071] 3-(5-(((1R,2R)-2-(isobutylamino)cycloheptyl)oxy)-1-oxoisoindolin-2-yl)piperidine-2,6-dione;
[2072] 3-(5-(((1R,2S)-2-(isobutylamino)cycloheptyl)oxy)-1-oxoisoindolin-2-yl)piperidine-2,6-dione;
[2073] 3-(5-((2-(isobutylamino)cycloheptyl)oxy)-1-oxoisoindolin-2-yl)piperidine-2,6-dione;
[2074] 3-(1-oxo-5-(((1S,2S)-2-(propylamino)cycloheptyl)oxy)isoindolin-2-yl)piperidine-2,6-dione;
[2075] 3-(1-oxo-5-(((1S,2R)-2-(propylamino)cycloheptyl)oxy)isoindolin-2-yl)piperidine-2,6-dione;
[2076] 3-(1-oxo-5-(((1R,2R)-2-(propylamino)cycloheptyl)oxy)isoindolin-2-yl)piperidine-2,6-dione;
[2077] 3-(1-oxo-5-(((1R,2S)-2-(propylamino)cycloheptyl)oxy)isoindolin-2-yl)piperidine-2,6-dione;
[2078] 3-(1-oxo-5-((2-(propylamino)cycloheptyl)oxy)isoindolin-2-yl)piperidine-2,6-dione;
[2079] 3-(5-(((1S,2S)-2-(2-oxa-6-azaspiro[3.3]heptan-6-yl)cycloheptyl)oxy)-1-oxoisoindolin-2--yl)piperidine-2,6-dione;
[2080] 3-(5-(((1S,2R)-2-(2-oxa-6-azaspiro[3.3]heptan-6-yl)cycloheptyl)oxy)-1-oxoisoindolin-2-yl)piperidine-2,6-dione;
[2081] 3-(5-(((1R,2R)-2-(2-oxa-6-azaspiro[3.3]heptan-6-yl)cycloheptyl)oxy)-1-oxoisoindolin-2-yl)piperidine-2,6-dione;
[2082] 3-(5-(((1R,2S)-2-(2-oxa-6-azaspiro[3.3]heptan-6-yl)cycloheptyl)oxy)-1-oxoisoindolin-2-yl)piperidine-2,6-dione;
[2083] 3-(5-((2-(2-oxa-6-azaspiro[3.3]heptan-6-yl)cycloheptyl)oxy)-1-oxoisoindolin-2-yl)piperidine-2,6-dione;
[2084] 3-(5-(((1S,2S)-2-((((1R,4S)-4-methoxycyclohexyl)methyl)amino)cycloheptyl)oxy)-1-oxoisoindolin-2-yl)piperidine-2,6-dione;
[2085] 3-(5-(((1S,2R)-2-((((1r,4R)-4-methoxycyclohexyl)methyl)amino)cycloheptyl)oxy)-1-oxoisoindolin-2-yl)piperidine-2,6-dione;
[2086] 3-(5-(((1R,2R)-2-((((1r,4R)-4-methoxycyclohexyl)methyl)amino)cycloheptyl)oxy)-1-oxoisoindolin-2-yl)piperidine-2,6-dione;
[2087] 3-(5-(((1R,2S)-2-((((1r,4S)-4-methoxycyclohexyl)methyl)amino)cycloheptyl)oxy)-1-oxoisoindolin-2-yl)piperidine-2,6-dione;
[2088] 3-(5-((2-((((1r,4r)-4-methoxycyclohexyl)methyl)amino)cycloheptyl)oxy)-1-oxoisoindolin-2-yl)piperidine-2,6-dione;
[2089] 3-(1-oxo-5-(((1S,2S)-2-(((tetrahydro-2H-pyran-4-yl)methyl)amino)cycloheptyl)oxy) isoindolin-2-yl)piperidine-2,6-dione;
[2090] 3-(1-oxo-5-(((1S,2R)-2-(((tetrahydro-2H-pyran-4-yl)methyl)amino)cycloheptyl)oxy)isoindolin-2-yl)piperidine-2,6-dione;
[2091] 3-(1-oxo-5-(((1R,2R)-2-(((tetrahydro-2H-pyran-4-yl)methyl)amino)cycloheptyl)oxy)isoindolin-2-yl)piperidine-2,6-dione;
[2092] 3-(1-oxo-5-(((1R,2S)-2-(((tetrahydro-2H-pyran-4-yl)methyl)amino)cycloheptyl)oxy)isoindolin-2-yl)piperidine-2,6-dione;
[2093] 3-(1-oxo-5-((2-(((tetrahydro-2H-pyran-4-yl)methyl)amino)cycloheptyl)oxy)isoindolin-2-yl)piperidine-2,6-dione;
[2094] 3-(5-(((1S,2S)-2-(((3-methyloxetan-3-yl)methyl)amino)cycloheptyl)oxy)-1-oxoisoindolin-2-yl)piperidine-2,6-dione;
[2095] 3-(5-(((1S,2R)-2-(((3-methyloxetan-3-yl)methyl)amino)cycloheptyl)oxy)-1-oxoisoindolin-2-yl)piperidine-2,6-dione;
[2096] 3-(5-(((1R,2R)-2-(((3-methyloxetan-3-yl)methyl)amino)cycloheptyl)oxy)-1-oxoisoindolin-2-yl)piperidine-2,6-dione;
[2097] 3-(5-(((1R,2S)-2-(((3-methyloxetan-3-yl)methyl)amino)cycloheptyl)oxy)-1-oxoisoindolin-2--yl)piperidine-2,6-dione;
[2098] 3-(5-((2-(((3-methyloxetan-3-yl)methyl)amino)cycloheptyl)oxy)-1-oxoisoindolin-2-yl)piperidine-2,6-dione;
[2099] 3-(5-(((1S,2S)-2-(((3-fluorobicyclo[1.1.1]pentan-1-yl)methyl)amino)cycloheptyl)oxy)-1-oxoisoindolin-2-yl)piperidine-2,6-dione;
[2100] 3-(5-(((1S,2R)-2-(((3-fluorobicyclo[1.1.1]pentan-1-yl)methyl)amino)cycloheptyl)oxy)-1-oxoisoindolin-2-yl)piperidine-2,6-dione;
[2101] 3-(5-(((1R,2R)-2-(((3-fluorobicyclo[1.1.1]pentan-1-yl)methyl)amino)cycloheptyl)oxy)-1-oxoisoindolin-2-yl)piperidine-2,6-dione;
[2102] 3-(5-(((1R,2S)-2-(((3-fluorobicyclo[1.1.1]pentan-1-yl)methyl)amino)cycloheptyl)oxy)-1-oxoisoindolin-2-yl)piperidine-2,6-dione;
[2103] 3-(5-((2-(((3-fluorobicyclo[1.1.1]pentan-1-yl)methyl)amino)cycloheptyl)oxy)-1-oxoisoindolin-2-yl)piperidine-2,6-dione;
[2104] 3-(5-(((1S,2S)-2-(3-methoxyazetidin-1-yl)cycloheptyl)oxy)-1-oxoisoindolin-2-yl)piperidine-2,6-dione;
[2105] 3-(5-(((1S,2R)-2-(3-methoxyazetidin-1-yl)cycloheptyl)oxy)-1-oxoisoindolin-2-yl)piperidine-2,6-dione;
[2106] 3-(5-(((1R,2R)-2-(3-methoxyazetidin-1-yl)cycloheptyl)oxy)-1-oxoisoindolin-2-yl)piperidine-2,6-dione;
[2107] 3-(5-(((1R,2S)-2-(3-methoxyazetidin-1-yl)cycloheptyl)oxy)-1-oxoisoindolin-2-yl)piperidine-2,6-dione;
[2108] 3-(5-((2-(3-methoxyazetidin-1-yl)cycloheptyl)oxy)-1-oxoisoindolin-2-yl)piperidine-2,6-dione;
[2109] 3-(5-(((1S,2S)-2-(((3,3-difluorocyclobutyl)methyl)amino)cycloheptyl)oxy)-1-oxoisoindolin-2-yl)piperidine-2,6-dione;
[2110] 3-(5-(((1S,2R)-2-(((3,3-difluorocyclobutyl)methyl)amino)cycloheptyl)oxy)-1-oxoisoindolin-2-yl)piperidine-2,6-dione;
[2111] 3-(5-(((1R,2R)-2-(((3,3-difluorocyclobutyl)methyl)amino)cycloheptyl)oxy)-1-oxoisoindolin-2-yl)piperidine-2,6-dione;
[2112] 3-(5-(((1R,2S)-2-(((3,3-difluorocyclobutyl)methyl)amino)cycloheptyl)oxy)-1-oxoisoindolin-2-yl)piperidine-2,6-dione;
[2113] 3-(5-((2-(((3,3-difluorocyclobutyl)methyl)amino)cycloheptyl)oxy)-1-oxoisoindolin-2-yl)piperidine-2,6-dione;
[2114] 3-(5-((2-(diethylamino)-3-methylcyclopentyl)oxy)-1-oxoisoindolin-2-yl)piperidine-2,6-dione;
[2115] 3-(5-(((1S,2S)-2-(diethylamino)-3-methylcyclopentyl)oxy)-1-oxoisoindolin-2-yl)piperidine-2,6-dione;
[2116] 3-(5-(((1S,2R)-2-(diethylamino)-3-methylcyclopentyl)oxy)-1-oxoisoindolin-2-yl)piperidine-2,6-dione;
[2117] 3-(5-(((1R,2R)-2-(diethylamino)-3-methylcyclopentyl)oxy)-1-oxoisoindolin-2-yl)piperidine-2,6-dione;
[2118] 3-(5-(((1R,2S)-2-(diethylamino)-3-methylcyclopentyl)oxy)-1-oxoisoindolin-2-yl)piperidine-2,6-dione;
[2119] 3-(1-oxo-5-(((1S,2S)-2-(3-(pyridazin-3-yloxy)azetidin-1-yl)cyclohexyl)oxy)isoindolin-2-yl)piperidine-2,6-dione;
[2120] 3-(1-oxo-5-(((1S,2R)-2-(3-(pyridazin-3-yloxy)azetidin-1-yl)cyclohexyl)oxy)isoindolin-2-yl)piperidine-2,6-dione;
[2121] 3-(1-oxo-5-(((1R,2R)-2-(3-(pyridazin-3-yloxy)azetidin-1-yl)cyclohexyl)oxy)isoindolin-2-yl)piperidine-2,6-dione;
[2122] 3-(1-oxo-5-(((1R,2S)-2-(3-(pyridazin-3-yloxy)azetidin-1-yl)cyclohexyl)oxy)isoindolin-2-yl)piperidine-2,6-dione;
[2123] 3-(1-oxo-5-((2-(3-(pyridazin-3-yloxy)azetidin-1-yl)cyclohexyl)oxy)isoindolin-2-yl)piperidine-2,6-dione;
[2124] 3-(5-(((1S,2S)-2-(3-isopropoxyazetidin-1-yl)cyclopentyl)oxy)-1-oxoisoindolin-2-yl)piperidine-2,6-dione;
[2125] 3-(5-(((1S,2R)-2-(3-isopropoxyazetidin-1-yl)cyclopentyl)oxy)-1-oxoisoindolin-2-yl)piperidine-2,6-dione;
[2126] 3-(5-(((1R,2R)-2-(3-isopropoxyazetidin-1-yl)cyclopentyl)oxy)-1-oxoisoindolin-2-yl)piperidine-2,6-dione;
[2127] 3-(5-(((1R,2S)-2-(3-isopropoxyazetidin-1-yl)cyclopentyl)oxy)-1-oxoisoindolin-2-yl)piperidine-2,6-dione;
[2128] 3-(5-((2-(3-isopropoxyazetidin-1-yl)cyclopentyl)oxy)-1-oxoisoindolin-2-yl)piperidine-2,6-dione;
[2129] 3-(1-oxo-5-(((1S,2S)-2-(3-(2,2,2-trifluoroethoxy)azetidin-1-yl)cyclopentyl)oxy)isoindolin-2-yl)piperidine-2,6-dione;
[2130] 3-(1-oxo-5-(((1S,2R)-2-(3-(2,2,2-trifluoroethoxy)azetidin-1-yl)cyclopentyl)oxy)isoindolin-2-yl)piperidine-2,6-dione;
[2131] 3-(1-oxo-5-(((1R,2R)-2-(3-(2,2,2-trifluoroethoxy)azetidin-1-yl)cyclopentyl)oxy)isoindolin-2-yl)piperidine-2,6-dione;
[2132] 3-(1-oxo-5-(((1R,2S)-2-(3-(2,2,2-trifluoroethoxy)azetidin-1-yl)cyclopentyl)oxy)isoindolin-2-yl)piperidine-2,6-dione;
[2133] 3-(1-oxo-5-((2-(3-(2,2,2-trifluoroethoxy)azetidin-1-yl)cyclopentyl)oxy)isoindolin-2-yl)piperidine-2,6-dione;
[2134] 3-(5-(((1S,2S)-2-(3,3-dimethylpiperidin-1-yl)cyclopentyl)oxy)-1-oxoisoindolin-2--yl)piperidine-2,6-dione;
[2135] 3-(5-(((1S,2R)-2-(3,3-dimethylpiperidin-1-yl)cyclopentyl)oxy)-1-oxoisoindolin-2-yl)piperidine-2,6-dione;
[2136] 3-(5-(((1R,2S)-2-(3,3-dimethylpiperidin-1-yl)cyclopentyl)oxy)-1-oxoisoindolin-2-yl)piperidine-2,6-dione;
[2137] 3-(5-(((1R,2R)-2-(3,3-dimethylpiperidin-1-yl)cyclopentyl)oxy)-1-oxoisoindolin-2-yl)piperidine-2,6-dione;
[2138] 3-(5-((2-(3,3-dimethylpiperidin-1-yl)cyclopentyl)oxy)-1-oxoisoindolin-2-yl)piperidine-2,6-dione;
[2139] 3-(5-(((1S,2S)-2-(3-isopropoxyazetidin-1-yl)cyclopentyl)oxy)-1-oxoisoindolin-2-yl)piperidine-2,6-dione;
[2140] 3-(5-(((1S,2R)-2-(3-isopropoxyazetidin-1-yl)cyclopentyl)oxy)-1-oxoisoindolin-2-yl)piperidine-2,6-dione;
[2141] 3-(5-(((1R,2R)-2-(3-isopropoxyazetidin-1-yl)cyclopentyl)oxy)-1-oxoisoindolin-2-yl)piperidine-2,6-dione;
[2142] 3-(5-(((1R,2S)-2-(3-isopropoxyazetidin-1-yl)cyclopentyl)oxy)-1-oxoisoindolin-2-yl)piperidine-2,6-dione;
[2143] 3-(5-((2-(3-isopropoxyazetidin-1-yl)cyclopentyl)oxy)-1-oxoisoindolin-2-yl)piperidine-2,6-dione;
[2144] 3-(5-(((1S,2S,3S,4R)-3-(3-ethoxyazetidin-1-yl)bicyclo[2.2.1]heptan-2-yl)oxy)-1-oxoisoindolin-2-yl)piperidine-2,6-dione;
[2145] 3-(5-(((1S,2S,3R,4R)-3-(3-ethoxyazetidin-1-yl)bicyclo[2.2.1]heptan-2-yl)oxy)-1-oxoisoindolin-2-yl)piperidine-2,6-dione;
[2146] 3-(5-(((1S,2R,3R,4R)-3-(3-ethoxyazetidin-1-yl)bicyclo[2.2.1]heptan-2-yl)oxy)-1-oxoisoindolin-2-yl)piperidine-2,6-dione;
[2147] 3-(5-(((1S,2R,3S,4R)-3-(3-ethoxyazetidin-1-yl)bicyclo[2.2.1]heptan-2-yl)oxy)-1-oxoisoindolin-2-yl)piperidine-2,6-dione;
[2148] 3-(5-(((1S,4R)-3-(3-ethoxyazetidin-1-yl)bicyclo[2.2.1]heptan-2-yl)oxy)-1-oxoisoindolin-2-yl)piperidine-2,6-dione;
[2149] 3-(5-(((1R,2S,3S,4S)-3-(3-ethoxyazetidin-1-yl)bicyclo[2.2.1]heptan-2-yl)oxy)-1-oxoisoindolin-2-yl)piperidine-2,6-dione;
[2150] 3-(5-(((1R,2S,3R,4S)-3-(3-ethoxyazetidin-1-yl)bicyclo[2.2.1]heptan-2-yl)oxy)-1-oxoisoindolin-2-yl)piperidine-2,6-dione;
[2151] 3-(5-(((1R,2R,3R,4S)-3-(3-ethoxyazetidin-1-yl)bicyclo[2.2.1]heptan-2-yl)oxy)-1-oxoisoindolin-2-yl)piperidine-2,6-dione;
[2152] 3-(5-(((1R,2R,3S,4S)-3-(3-ethoxyazetidin-1-yl)bicyclo[2.2.1]heptan-2-yl)oxy)-1-oxoisoindolin-2-yl)piperidine-2,6-dione;
[2153] 3-(5-(((1R,4S)-3-(3-ethoxyazetidin-1-yl)bicyclo[2.2.1]heptan-2-yl)oxy)-1-oxoisoindolin-2-yl)piperidine-2,6-dione;
[2154] 3-(1-oxo-5-(((1S,2S)-2-(3-(pyrazin-2-yloxy)azetidin-1-yl)cyclohexyl)oxy)isoindolin-2-yl)piperidine-2,6-dione;
[2155] 3-(1-oxo-5-(((1S,2R)-2-(3-(pyrazin-2-yloxy)azetidin-1-yl)cyclohexyl)oxy)isoindolin-2-yl)piperidine-2,6-dione;
[2156] 3-(1-oxo-5-(((1R,2R)-2-(3-(pyrazin-2-yloxy)azetidin-1-yl)cyclohexyl)oxy)isoindolin-2-yl)piperidine-2,6-dione;
[2157] 3-(1-oxo-5-(((1R,2S)-2-(3-(pyrazin-2-yloxy)azetidin-1-yl)cyclohexyl)oxy)isoindolin-2-yl)piperidine-2,6-dione;
[2158] 3-(1-oxo-5-((2-(3-(pyrazin-2-yloxy)azetidin-1-yl)cyclohexyl)oxy)isoindolin-2-yl)piperidine-2,6-dione;
[2159] 3-(5-(((1S,2S)-2-aminocyclopentyl)oxy)-4-fluoro-1-oxoisoindolin-2-yl)piperidine-2,6-dione;
[2160] 3-(5-(((1S,2R)-2-aminocyclopentyl)oxy)-4-fluoro-1-oxoisoindolin-2-yl)piperidine-2,6-dione;
[2161] 3-(5-(((1R,2R)-2-aminocyclopentyl)oxy)-4-fluoro-1-oxoisoindolin-2-yl)piperidine-2,6-dione;
[2162] 3-(5-(((1R,2S)-2-aminocyclopentyl)oxy)-4-fluoro-1-oxoisoindolin-2-yl)piperidine-2,6-dione;
[2163] 3-(5-((2-aminocyclopentyl)oxy)-4-fluoro-1-oxoisoindolin-2-yl)piperidine-2,6-dione;
[2164] 3-(5-(((1S,2S)-2-(diethylamino)cyclopentyl)oxy)-4-fluoro-1-oxoisoindolin-2-yl)piperidine-2,6-dione;
[2165] 3-(5-(((1S,2R)-2-(diethylamino)cyclopentyl)oxy)-4-fluoro-1-oxoisoindolin-2-yl)piperidine-2,6-dione;
[2166] 3-(5-(((1R,2R)-2-(diethylamino)cyclopentyl)oxy)-4-fluoro-1-oxoisoindolin-2-yl)piperidine-2,6-dione;
[2167] 3-(5-(((1R,2S)-2-(diethylamino)cyclopentyl)oxy)-4-fluoro-1-oxoisoindolin-2-yl)piperidine-2,6-dione;
[2168] 3-(5-((2-(diethylamino)cyclopentyl)oxy)-4-fluoro-1-oxoisoindolin-2-yl)piperidine-2,6-dione;
[2169] 3-(5-(((1S,2S)-2-aminocyclopentyl)oxy)-6-fluoro-1-oxoisoindolin-2-yl)piperidine-2,6-dione;
[2170] 3-(5-(((1S,2R)-2-aminocyclopentyl)oxy)-6-fluoro-1-oxoisoindolin-2-yl)piperidine-2,6-dione;
[2171] 3-(5-(((1R,2R)-2-aminocyclopentyl)oxy)-6-fluoro-1-oxoisoindolin-2-yl)piperidine-2,6-dione;
[2172] 3-(5-(((1R,2S)-2-aminocyclopentyl)oxy)-6-fluoro-1-oxoisoindolin-2-yl)piperidine-2,6-dione;
[2173] 3-(5-((2-aminocyclopentyl)oxy)-6-fluoro-1-oxoisoindolin-2-yl)piperidine-2,6-dione;
[2174] 3-(5-(((1S,2S)-2-(diethylamino)cyclopentyl)oxy)-6-fluoro-1-oxoisoindolin-2-yl)piperidine-2,6-dione;
[2175] 3-(5-(((1S,2R)-2-(diethylamino)cyclopentyl)oxy)-6-fluoro-1-oxoisoindolin-2-yl)piperidine-2,6-dione;
[2176] 3-(5-(((1R,2R)-2-(diethylamino)cyclopentyl)oxy)-6-fluoro-1-oxoisoindolin-2-yl)piperidine-2,6-dione;
[2177] 3-(5-(((1R,2S)-2-(diethylamino)cyclopentyl)oxy)-6-fluoro-1-oxoisoindolin-2-yl)piperidine-2,6-dione; and
[2178] 3-(5-((2-(diethylamino)cyclopentyl)oxy)-6-fluoro-1-oxoisoindolin-2-yl)piperidine-2,6-dione.
   [2179] or a pharmaceutically acceptable salt, hydrate, solvate, prodrug, stereoisomer, and tautomer thereof.

[2180] Other IKZF2 inhibitors are described in International Publication No. WO2020/012334, which is incorporated by reference in its entirety.

[2181] In some embodiments, the IKZF2 inhibitor comprises a compound of Formula (I′),

[chemical structure]

[2182] or a pharmaceutically acceptable salt, hydrate, solvate, prodrug, stereoisomer, or tautomer thereof,
[2183] wherein:
[2184] X₁ is CR₃;
[2185] [symbol] is optionally a double bond when X₁ is CR₃ and R₃ is absent;
[2186] each R₁ is independently (C₁-C₆)alkyl, (C₁-C₆)haloalkyl, (C₁-C₆)hydroxyalkyl, or halogen, or
[2187] two R₁ together with the carbon atoms to which they are attached form a 5- or 6-membered heterocycloalkyl ring, or
[2188] two R₁, when on adjacent atoms, together with the atoms to which they are attached form a (C₆-C₁₀)aryl ring or a 5- or 6-membered heteroaryl ring comprising 1 to 3 heteroatoms selected from 0, N, and S;
[2189] R₂ is (C₁-C₆)alkyl, —C(O)(C₁-C₆)alkyl, —C(O)(CH₂)₀₋₃(C₆-C₁₀)aryl, —C(O)O(CH₂)₀₋₃(C₆-C₁₀)aryl, (C₆-C₁₀)aryl, 5- or 6-membered heteroaryl comprising 1 to 3 heteroatoms selected from O, N, and S, or (C₃-C₈)cycloalkyl, wherein the alkyl is optionally substituted with one or more R₄; and the aryl, heteroaryl, and cycloalkyl are optionally substituted with one or more R₅, or
[2190] R₁ and R₂, when on adjacent atoms, together with the atoms to which they are attached form a 5- or 6-membered heterocycloalkyl ring;
[2191] R₃ is H or R₃ is absent when [symbol] is a double bond;
[2192] each R₄ is independently selected from —C(O)OR₆, —C(O)NR₆R₆, —NR₆C(O)R₆, halogen, —OH, —NH₂, CN, (C₆-C₁₀)aryl, 5- or 6-membered heteroaryl comprising 1 to 4 heteroatoms selected from 0, N, and S, (C₃-C₈)cycloalkyl, and 5- to 7-membered heterocycloalkyl ring comprising 1 to 3 heteroatoms selected from O, N, and S, wherein the aryl, heteroaryl, cycloalkyl, and heterocycloalkyl groups are optionally substituted with one or more R₇;
[2193] each R₅ is independently selected from (C₁-C₆)alkyl, (C₂-C₆)alkenyl, (C₂-C₆)alkynyl, (C₁-C₆)alkoxy, (C₁-C₆)haloalkyl, (C₁-C₆)haloalkoxy, (C₁-C₆)hydroxyalkyl, halogen, —OH, —NH₂, CN, (C₃-C₇)cycloalkyl, 5- to 7-membered heterocycloalkyl comprising 1 to 3 heteroatoms selected from O, N, and S, (C₆-C₁₀)aryl, and 5- or 6-membered heteroaryl comprising 1 to 3 heteroatoms selected from O, N, and S, or
[2194] two R₅, when on adjacent atoms, together with the atoms to which they are attached form a (C₆-C₁₀)aryl ring or a 5- or 6-membered heteroaryl ring comprising 1 to 3 heteroatoms selected from O, N, and S, optionally substituted with one or more R₁₀, or
[2195] two R₅, when on adjacent atoms, together with the atoms to which they are attached form a (C₅-C₇)cycloalkyl ring or a 5- to 7-membered heterocycloalkyl ring comprising 1 to 3 heteroatoms selected from O, N, and S optionally substituted with one or more R₁₀;
[2196] R₆ and R₆ are each independently H, (C₁-C₆)alkyl, or (C₆-C₁₀)aryl;
[2197] each R₇ is independently selected from (C₁-C₆)alkyl, (C₂-C₆)alkenyl, (C₂-C₆)alkynyl, (C₁-C₆)alkoxy, (C₁-C₆)haloalkyl, (C₁-C₆)haloalkoxy, —C(O)R₈, —(CH₂)₀₋₃C(O)OR₈, —C(O)NR₈R₉, —NR₈C(O)R₉, —NR₈C(O)OR₉, —S(O)ₚNR₈R₉, —S(O)ₚR₁₂, (C₁-C₆)hydroxyalkyl, halogen, —OH, —O(CH₂)₁₋₃CN, —NH₂, CN, —O(CH₂)₀₋₃(C₆-C₁₀)aryl, adamantyl, —O(CH₂)₀₋₃-5- or 6-membered heteroaryl comprising 1 to 3 heteroatoms selected from O, N, and S, (C₆-C₁₀)aryl, monocyclic or bicyclic 5- to 10-membered heteroaryl comprising 1 to 3 heteroatoms selected from O, N, and S, (C₃-C₇)cycloalkyl, and 5- to 7-membered heterocycloalkyl comprising 1 to 3 heteroatoms selected from O, N, and S, wherein the alkyl is optionally substituted with one or more R₁₁, and the aryl, heteroaryl, and heterocycloalkyl are optionally substituted with one or more substituents each independently selected from halogen, (C₁-C₆)alkyl, (C₁-C₆)haloalkyl, and (C₁-C₆)alkoxy, or
[2198] two R₇ together with the carbon atom to which they are attached form a=(O), or
[2199] two R₇, when on adjacent atoms, together with the atoms to which they are attached form a (C₆-C₁₀)aryl ring or a 5- or 6-membered heteroaryl ring comprising 1 to 3 heteroatoms selected from O, N, and S, optionally substituted with one or more R₁₀, or
[2200] two R₇ together with the atoms to which they are attached form a (C₅-C₇) cycloalkyl ring or a 5- to 7-membered heterocycloalkyl ring comprising 1 to 3 heteroatoms selected from O, N, and S, optionally substituted with one or more R₁₀;
[2201] R₈ and R₉ are each independently H or (C₁-C₆)alkyl;
[2202] each R₁₀ is independently selected from (C₁-C₆)alkyl, (C₁-C₆)alkoxy, (C₁-C₆)haloalkyl, (C₁-C₆)haloalkoxy, (C₁-C₆)hydroxyalkyl, halogen, —OH, —NH₂, and CN, or
[2203] two R₁₀ together with the carbon atom to which they are attached form a=(O);
[2204] each R₁₁ is independently selected from CN, (C₁-C₆)alkoxy, (C₆-C₁₀)aryl, and 5- to 7-membered heterocycloalkyl comprising 1 to 3 heteroatoms selected from O, N, and S, wherein the aryl and heterocycloalkyl are optionally substituted with one or more substituents each independently selected from (C₁-C₆)alkyl, (C₁-C₆)alkoxy, (C₁-C₆)haloalkyl, (C₁-C₆)haloalkoxy, (C₁-C₆)hydroxyalkyl, halogen, —OH, —NH₂, and CN;
[2205] R₁₂ is (C₁-C₆)alkyl, (C₁-C₆)haloalkyl, (C₆-C₁₀)aryl, or 5- to 7-membered heterocycloalkyl comprising 1 to 3 heteroatoms selected from O, N, and S;
[2206] Rₓ is H or D;
[2207] p is 0, 1, or 2;
[2208] n is 0, 1, or 2;
[2209] n1 is 1 or 2, wherein n+n1≤3; and
[2210] q is 0, 1, 2, 3, or 4.

[2211] In some embodiments, the compound has a Formula (I),

[chemical structure]

[2212] or a pharmaceutically acceptable salt, hydrate, solvate, prodrug, stereoisomer, or tautomer thereof,
[2213] wherein:
[2214] X₁ is CR₃;
[2215] [symbol] is optionally a double bond when X₁ is CR₃ and R₃ is absent;
[2216] each R₁ is independently (C₁-C₆)alkyl, (C₁-C₆)haloalkyl, (C₁-C₆)hydroxyalkyl, or halogen;
[2217] R₂ is (C₁-C₆)alkyl, (C₆-C₁₀)aryl, 5- or 6-membered heteroaryl comprising 1 to 3 heteroatoms selected from O, N, and S, or (C₃-C₈)cycloalkyl, wherein the alkyl is optionally substituted with one or more R₄; and the aryl, heteroaryl, and cycloalkyl are optionally substituted with one or more R₅;
[2218] R₃ is H or R₃ is absent when [symbol] is a double bond;
[2219] each R₄ is independently selected from —C(O)OR₆, —C(O)NR₆R_{6′}, —NR₆C(O)R_{6′}, (C₆-C₁₀)aryl, 5- or 6-membered heteroaryl comprising 1 to 3 heteroatoms selected from O, N, and S, (C₃-C₈)cycloalkyl, and 5- to 7-membered heterocycloalkyl comprising 1 to 3 heteroatoms selected from O, N, and S, wherein the aryl, heteroaryl, cycloalkyl, and heterocycloalkyl groups are optionally substituted with one or more R₇;
[2220] each R₈ is independently selected from (C₁-C₆)alkyl, (C₂-C₆)alkenyl, (C₂-C₆)alkynyl, (C₁-C₆)alkoxy, (C₁-C₆)haloalkyl, (C₁-C₆)haloalkoxy, (C₁-C₆)hydroxyalkyl, halogen, —OH, —NH₂, CN, (C₃-C₇)cycloalkyl, 5- to 7-membered heterocycloalkyl comprising 1 to 3 heteroatoms selected from O, N, and S, (C₆-C₁₀)aryl, and 5- or 6-membered heteroaryl comprising 1 to 3 heteroatoms selected from O, N, and S, or
[2221] two R₅, when on adjacent atoms, together with the atoms to which they are attached form a (C₆-C₁₀)aryl ring or a 5- or 6-membered heteroaryl ring comprising 1 to 3 heteroatoms selected from O, N, and S, optionally substituted with one or more R₁₀, or
[2222] two R₅, when on adjacent atoms, together with the atoms to which they are attached form a (C₅-C₇)cycloalkyl ring or a 5- to 7-membered heterocycloalkyl ring comprising 1 to 3 heteroatoms selected from O, N, and S optionally substituted with one or more R₁₀;
[2223] R₆ and R₆ are each independently H or (C₁-C₆)alkyl;
[2224] each R₇ is independently selected from (C₁-C₆)alkyl, (C₂-C₆)alkenyl, (C₂-C₆)alkynyl, (C₁-C₆)alkoxy, (C₁-C₆)haloalkyl, (C₁-C₆)haloalkoxy, —C(O)R₈, —C(O)OR₈, —C(O)NR₈R₉, —NR₈C(O)R₉, (C₁-C₆)hydroxyalkyl, halogen, —OH, —NH₂, CN, (C₆-C₁₀)aryl, 5- or 6-membered heteroaryl comprising 1 to 3 heteroatoms selected from O, N, and S, (C₃-C₇)cycloalkyl, and 5- to 7-membered heterocycloalkyl comprising 1 to 3 heteroatoms selected from O, N, and S, or
[2225] two R₇, when on adjacent atoms, together with the atoms to which they are attached form a (C₆-C₁₀)aryl ring or a 5- or 6-membered heteroaryl ring comprising 1 to 3 heteroatoms selected from O, N, and S, optionally substituted with one or more R₁₀, or
[2226] two R₇, when on adjacent atoms, together with the atoms to which they are attached form a (C₅-C₇)cycloalkyl ring or a 5- to 7-membered heterocycloalkyl ring comprising 1 to 3 heteroatoms selected from O, N, and S, optionally substituted with one or more R₁₀;
[2227] R₈ and R₉ are each independently H or (C₁-C₆)alkyl;
[2228] each R₁₀ is independently selected from (C₁-C₆)alkyl, (C₁-C₆)alkoxy, (C₁-C₆)haloalkyl, (C₁-C₆)haloalkoxy, (C₁-C₆)hydroxyalkyl, halogen, —OH, —NH₂, and CN;
[2229] Rₓ is H or D;
[2230] n is 1 or 2; and
[2231] q is 0, 1, 2, 3, or 4.

[2232] In some embodiments, n is 1. In some embodiments, n is 2. In some embodiments, q is 0, 1, or 2. In some embodiments, X₁ is CH. In some embodiments, Rₓ is H. In some embodiments, R₂ is (C₆-C₁₀)aryl, or (C₃-C₈)cycloalkyl, wherein the aryl, heteroaryl, and cycloalkyl are optionally substituted with one to three R₅. In some embodiments, R₂ is (C₆-C₁₀)aryl or (C₃-C₈)cycloalkyl. In some embodiments, R₂ is (C₁-C₆)alkyl optionally substituted with one to three R₄.

[2233] In some embodiments, the compound has a Formula (Ia), Formula (Ib), Formula (Ic), or Formula (Id):

[chemical structure]

[2234] In some embodiments, R₂ is (C₆-C₁₀)aryl or (C₃-C₈)cycloalkyl, wherein the aryl and cycloalkyl are optionally substituted with one to three R₅. In some embodiments, R₂ is (C₆-C₁₀)aryl or (C₃-C₈)cycloalkyl. In some embodiments, R₂ is (C₁-C₆)alkyl optionally substituted with one to three R₄.

[2235] In some embodiments, the compound is selected from:
[2236] 3-(5-(1-ethylpiperidin-4-yl)-1-oxoisoindolin-2-yl)piperidine-2,6-dione;
[2237] 3-(1-oxo-5-(1-propylpiperidin-4-yl)isoindolin-2-yl)piperidine-2,6-dione;
[2238] 3-(5-(1-(cyclopropylmethyl)piperidin-4-yl)-1-oxoisoindolin-2-yl)piperidine-2,6-dione;
[2239] 3-(5-(1-isobutylpiperidin-4-yl)-1-oxoisoindolin-2-yl)piperidine-2,6-dione;
[2240] 3-(5-(1-(cyclobutylmethyl)piperidin-4-yl)-1-oxoisoindolin-2-yl)piperidine-2,6-dione;
[2241] 3-(5-(1-(oxazol-2-ylmethyl)piperidin-4-yl)-1-oxoisoindolin-2-yl)piperidine-2,6-dione;
[2242] 3-(1-oxo-5-(1-(thiazol-2-ylmethyl)piperidin-4-yl)isoindolin-2-yl)piperidine-2,6-dione;
[2243] 3-(5-(1-(cyclopentylmethyl)piperidin-4-yl)-1-oxoisoindolin-2-yl)piperidine-2,6-dione;
[2244] 3-(5-(1-((5-chlorothiophen-2-yl)methyl)piperidin-4-yl)-1-oxoisoindolin-2-yl)piperidine-2,6-dione;
[2245] 3-(5-(1-((2-chlorothiazol-5-yl)methyl)piperidin-4-yl)-1-oxoisoindolin-2-yl)piperidine-2,6-dione;
[2246] 3-(5-(1-(cyclohexylmethyl)piperidin-4-yl)-1-oxoisoindolin-2-yl)piperidine-2,6-dione;
[2247] 3-(1-oxo-5-(1-(2-(pyrrolidin-1-yl)ethyl)piperidin-4-yl)isoindolin-2-yl)piperidine-2,6-dione;
[2248] 3-(1-oxo-5-(1-((tetrahydro-2H-pyran-4-yl)methyl)piperidin-4-yl)isoindolin-2-yl)piperidine-2,6-dione;
[2249] 3-(1-oxo-5-(1-phenethylpiperidin-4-yl)isoindolin-2-yl)piperidine-2,6-dione;
[2250] 3-(5-(1-(3-fluorobenzyl)piperidin-4-yl)-1-oxoisoindolin-2-yl)piperidine-2,6-dione;
[2251] 3-(5-(1-(3-chlorobenzyl)piperidin-4-yl)-1-oxoisoindolin-2-yl)piperidine-2,6-dione;
[2252] 3-(5-(1-(2-fluorobenzyl)piperidin-4-yl)-1-oxoisoindolin-2-yl)piperidine-2,6-dione;
[2253] 3-(5-(1-(2-chlorobenzyl)piperidin-4-yl)-1-oxoisoindolin-2-yl)piperidine-2,6-dione;
[2254] 3-(1-oxo-5-(1-(2-(piperidin-1-yl)ethyl)piperidin-4-yl)isoindolin-2-yl)piperidine-2,6-dione;
[2255] 3-(5-(1-((3,5-dimethylisoxazol-4-yl)methyl)piperidin-4-yl)-1-oxoisoindolin-2-yl)piperidine-2,6-dione;
[2256] 3-(5-(1-((1,3-dimethyl-1H-pyrazol-5-yl)methyl)piperidin-4-yl)-1-oxoisoindolin-2-yl)piperidine-2,6-dione;
[2257] 3-(5-(1-((6-methylpyridin-2-yl)methyl)piperidin-4-yl)-1-oxoisoindolin-2-yl)piperidine-2,6-dione;
[2258] 3-(5-(1-(3-morpholinopropyl)piperidin-4-yl)-1-oxoisoindolin-2-yl)piperidine-2,6-dione;
[2259] 3-(5-(1-(2,6-difluorobenzyl)piperidin-4-yl)-1-oxoisoindolin-2-yl)piperidine-2,6-dione;
[2260] 3-(5-(1-(2,6-dichlorobenzyl)piperidin-4-yl)-1-oxoisoindolin-2-yl)piperidine-2,6-dione;
[2261] 3-(5-(1-(3,5-difluorobenzyl)piperidin-4-yl)-1-oxoisoindolin-2-yl)piperidine-2,6-dione;
[2262] 3-(5-(1-(3,5-dibromobenzyl)piperidin-4-yl)-1-oxoisoindolin-2-yl)piperidine-2,6-dione;
[2263] 3-(5-(1-(3-chloro-5-fluorobenzyl)piperidin-4-yl)-1-oxoisoindolin-2-yl)piperidine-2,6-dione;
[2264] 3-(5-(1-(2,5-difluorobenzyl)piperidin-4-yl)-1-oxoisoindolin-2-yl)piperidine-2,6-dione;
[2265] 3-(5-(1-(2,5-dichlorobenzyl)piperidin-4-yl)-1-oxoisoindolin-2-yl)piperidine-2,6-dione;
[2266] 4-((4-(2-(2,6-dioxopiperidin-3-yl)-1-oxoisoindolin-5-yl)piperidin-1-yl)methyl)benzonitrile;
[2267] 3-(5-(1-(4-(hydroxymethyl)benzyl)piperidin-4-yl)-1-oxoisoindolin-2-yl)piperidine-2,6-dione;
[2268] 3-(5-(1-(3,4-dichlorobenzyl)piperidin-4-yl)-1-oxoisoindolin-2-yl)piperidine-2,6-dione;
[2269] 3-(5-(1-(4-chloro-2-fluorobenzyl)piperidin-4-yl)-1-oxoisoindolin-2-yl)piperidine-2,6-dione;
[2270] 3-(5-(1-(2-chloro-4-fluorobenzyl)piperidin-4-yl)-1-oxoisoindolin-2-yl)piperidine-2,6-dione; 3-((4-(2-(2,6-dioxopiperidin-3-yl)-1-oxoisoindolin-5-yl)piperidin-1-yl)methyl)benzonitrile;
[2271] 3-(5-(1-(2,3-difluorobenzyl)piperidin-4-yl)-1-oxoisoindolin-2-yl)piperidine-2,6-dione;
[2272] 2-((4-(2-(2,6-dioxopiperidin-3-yl)-1-oxoisoindolin-5-yl)piperidin-1-yl)methyl)benzonitrile;
[2273] 3-(5-(1-(4-methoxybenzyl)piperidin-4-yl)-1-oxoisoindolin-2-yl)piperidine-2,6-dione;
[2274] 3-(5-(1-(2,5-dimethylbenzyl)piperidin-4-yl)-1-oxoisoindolin-2-yl)piperidine-2,6-dione;
[2275] 3-(5-(1-(3,4-dimethylbenzyl)piperidin-4-yl)-1-oxoisoindolin-2-yl)piperidine-2,6-dione;
[2276] 3-(5-(1-(2,4-dimethylbenzyl)piperidin-4-yl)-1-oxoisoindolin-2-yl)piperidine-2,6-dione;
[2277] 3-(5-(1-((1H-indazol-4-yl)methyl)piperidin-4-yl)-1-oxoisoindolin-2-yl)piperidine-2,6-dione;
[2278] 3-(5-(1-((1H-benzo[d]imidazol-2-yl)methyl)piperidin-4-yl)-1-oxoisoindolin-2-yl)piperidine-2,6-dione;
[2279] 3-(5-(1-(4-isopropylbenzyl)piperidin-4-yl)-1-oxoisoindolin-2-yl)piperidine-2,6-dione;
[2280] methyl 5-((4-(2-(2,6-dioxopiperidin-3-yl)-1-oxoisoindolin-5-yl)piperidin-1-yl)methyl)furan-2-carboxylate;
[2281] 3-(5-(1-(naphthalen-2-ylmethyl)piperidin-4-yl)-1-oxoisoindolin-2-yl)piperidine-2,6-dione;
[2282] 3-(1-oxo-5-(1-(quinolin-2-ylmethyl)piperidin-4-yl)isoindolin-2-yl)piperidine-2,6-dione;
[2283] 3-(5-(1-(naphthalen-1-ylmethyl)piperidin-4-yl)-1-oxoisoindolin-2-yl)piperidine-2,6-dione;
[2284] 3-(5-(1-((1-methyl-1H-benzo[d]imidazol-2-yl)methyl)piperidin-4-yl)-1-oxoisoindolin-2-yl)piperidine-2,6-dione;
[2285] 3-(1-oxo-5-(1-(4-(trifluoromethoxy)benzyl)piperidin-4-yl)isoindolin-2-yl)piperidine-2,6-dione;
[2286] 3-(5-(1-(4-(1H-pyrrol-1-yl)benzyl)piperidin-4-yl)-1-oxoisoindolin-2-yl)piperidine-2,6-dione;
[2287] 3-(5-(1-(4-(1H-1,2,4-triazol-1-yl)benzyl)piperidin-4-yl)-1-oxoisoindolin-2-yl)piperidine-2,6-dione;
[2288] 3-(1-oxo-5-(1-(3-(trifluoromethoxy)benzyl)piperidin-4-yl)isoindolin-2-yl)piperidine-2,6-dione;
[2289] 3-(1-oxo-5-(1-(2-(trifluoromethoxy)benzyl)piperidin-4-yl)isoindolin-2-yl)piperidine-2,6-dione;
[2290] 3-(5-(1-benzylpiperidin-4-yl)-1-oxoisoindolin-2-yl)piperidine-2,6-dione;
[2291] 3-(1-oxo-5-(1-(pyridin-2-ylmethyl)piperidin-4-yl)isoindolin-2-yl)piperidine-2,6-dione;
[2292] 3-(1-oxo-5-(1-(pyridin-3-ylmethyl)piperidin-4-yl)isoindolin-2-yl)piperidine-2,6-dione;
[2293] 3-(1-oxo-5-(1-(pyridin-4-ylmethyl)piperidin-4-yl)isoindolin-2-yl)piperidine-2,6-dione;
[2294] 3-(1-oxo-5-(1-(pyrimidin-5-ylmethyl)piperidin-4-yl)isoindolin-2-yl)piperidine-2,6-dione;
[2295] 3-(1-oxo-5-(1-(1-phenylethyl)piperidin-4-yl)isoindolin-2-yl)piperidine-2,6-dione;
[2296] 3-(5-(1-(4-(fluoromethyl)benzyl)piperidin-4-yl)-1-oxoisoindolin-2-yl)piperidine-2,6-dione;
[2297] 3-(5-(1-(3,4-difluorobenzyl)piperidin-4-yl)-1-oxoisoindolin-2-yl)piperidine-2,6-dione;
[2298] 2-((4-(2-(2,6-dioxopiperidin-3-yl)-1-oxoisoindolin-5-yl)piperidin-1-yl)methyl)pyrimidine-5-carbonitrile;
[2299] 3-(5-(1-(4-ethylbenzyl)piperidin-4-yl)-1-oxoisoindolin-2-yl)piperidine-2,6-dione;
[2300] 3-(5-(1-(2-methoxybenzyl)piperidin-4-yl)-1-oxoisoindolin-2-yl)piperidine-2,6-dione;
[2301] 3-(5-(1-((2-methoxypyrimidin-5-yl)methyl)piperidin-4-yl)-1-oxoisoindolin-2-yl)piperidine-2,6-dione;
[2302] 3-(5-(1-(3-fluoro-4-methylbenzyl)piperidin-4-yl)-1-oxoisoindolin-2-yl)piperidine-2,6-dione;
[2303] 3-(5-(1-(4-(difluoromethyl)benzyl)piperidin-4-yl)-1-oxoisoindolin-2-yl)piperidine-2,6-dione;
[2304] 4-((4-(2-(2,6-dioxopiperidin-3-yl)-1-oxoisoindolin-5-yl)piperidin-1-yl)methyl)benzamide;
[2305] 4-((4-(2-(2,6-dioxopiperidin-3-yl)-1-oxoisoindolin-5-yl)piperidin-1-yl)methyl)benzoic acid;
[2306] 3-(5-(1-(3-(difluoromethyl)benzyl)piperidin-4-yl)-1-oxoisoindolin-2-yl)piperidine-2,6-dione; 3-((4-(2-(2,6-dioxopiperidin-3-yl)-1-oxoisoindolin-5-yl)piperidin-1-yl)methyl)benzoic acid;
[2307] 3-(1-oxo-5-(1-(4-propylbenzyl)piperidin-4-yl)isoindolin-2-yl)piperidine-2,6-dione;
[2308] 3-(1-oxo-5-(1-(4-(trifluoromethyl)benzyl)piperidin-4-yl)isoindolin-2-yl)piperidine-2,6-dione;
[2309] 3-(5-(1-(4-(difluoromethoxy)benzyl)piperidin-4-yl)-1-oxoisoindolin-2-yl)piperidine-2,6-dione;
[2310] 3-(1-oxo-5-(1-((5-(trifluoromethyl)pyridin-2-yl)methyl)piperidin-4-yl)isoindolin-2--yl)piperidine-2,6-dione;
[2311] 3-(5-(1-(3-(difluoromethoxy)benzyl)piperidin-4-yl)-1-oxoisoindolin-2-yl)piperidine-2,6-dione;
[2312] 3-(5-(1-(2-(difluoromethoxy)benzyl)piperidin-4-yl)-1-oxoisoindolin-2-yl)piperidine-2,6-dione;
[2313] 3-(5-(1-(4-cyclobutylbenzyl)piperidin-4-yl)-1-oxoisoindolin-2-yl)piperidine-2,6-dione;
[2314] 3-(5-(1-((2,3-dihydrobenzo[b][1,4]dioxin-5-yl)methyl)piperidin-4-yl)-1-oxoisoindolin-2-yl)piperidine-2,6-dione;
[2315] 3-(5-(1-((2,3-dihydrobenzo[b][1,4]dioxin-6-yl)methyl)piperidin-4-yl)-1-oxoisoindolin-2-yl)piperidine-2,6-dione;
[2316] 3-(5-(1-(4-(tert-butyl)benzyl)piperidin-4-yl)-1-oxoisoindolin-2-yl)piperidine-2,6-dione;
[2317] 3-(5-(1-(4-isobutylbenzyl)piperidin-4-yl)-1-oxoisoindolin-2-yl)piperidine-2,6-dione;
[2318] N-(4-((4-(2-(2,6-dioxopiperidin-3-yl)-1-oxoisoindolin-5-yl)piperidin-1-yl)methyl)phenyl)acetamide;
[2319] 3-(5-(1-((2,2-difluorobenzo[d][1,3]dioxol-5-yl)methyl)piperidin-4-yl)-1-oxoisoindolin-2-yl)piperidine-2,6-dione;
[2320] 3-(5-(1-((3,4-dihydro-2H-benzo[b][1,4]dioxepin-7-yl)methyl)piperidin-4-yl)-1-oxoisoindolin-2-yl)piperidine-2,6-dione;
[2321] 3-(1-oxo-5-(1-(4-(tert-pentyl)benzyl)piperidin-4-yl)isoindolin-2-yl)piperidine-2,6-dione;
[2322] 3-(5-(1-([1,1′-biphenyl]-4-ylmethyl)piperidin-4-yl)-1-oxoisoindolin-2-yl)piperidine-2,6-dione;
[2323] 3-(5-(1-(4-(1H-pyrazol-1-yl)benzyl)piperidin-4-yl)-1-oxoisoindolin-2-yl)piperidine-2,6-dione;
[2324] 3-(5-(1-(4-(1H-imidazol-1-yl)benzyl)piperidin-4-yl)-1-oxoisoindolin-2-yl)piperidine-2,6-dione;
[2325] 3-(5-(1-(3-(1H-pyrazol-1-yl)benzyl)piperidin-4-yl)-1-oxoisoindolin-2-yl)piperidine-2,6-dione;
[2326] 3-(5-(1-(4-cyclohexylbenzyl)piperidin-4-yl)-1-oxoisoindolin-2-yl)piperidine-2,6-dione;
[2327] 3-(1-oxo-5-(1-(pyrimidin-2-ylmethyl)piperidin-4-yl)isoindolin-2-yl)piperidine-2,6-dione;
[2328] 3-(5-(1-(4-bromobenzyl)piperidin-4-yl)-1-oxoisoindolin-2-yl)piperidine-2,6-dione;
[2329] 3-(5-(1-(4-chlorobenzyl)piperidin-4-yl)-1-oxoisoindolin-2-yl)piperidine-2,6-dione;
[2330] 3-(5-(1-(3,5-dichlorobenzyl)piperidin-4-yl)-1-oxoisoindolin-2-yl)piperidine-2,6-dione
[2331] 3-(5-(1-(4-chloro-3-fluorobenzyl)piperidin-4-yl)-1-oxoisoindolin-2-yl)piperidine-2,6-dione;
[2332] 3-(5-(1-(3-chloro-4-fluorobenzyl)piperidin-4-yl)-1-oxoisoindolin-2-yl)piperidine-2,6-dione;
[2333] 3-(5-(1-(2,4-difluorobenzyl)piperidin-4-yl)-1-oxoisoindolin-2-yl)piperidine-2,6-dione;
[2334] 3-(5-(1-(3-methoxybenzyl)piperidin-4-yl)-1-oxoisoindolin-2-yl)piperidine-2,6-dione;
[2335] 3-(5-(1-(benzo[c][1,2,5]oxadiazol-5-ylmethyl)piperidin-4-yl)-1-oxoisoindolin-2--yl)piperidine-2,6-dione;
[2336] 3-(5-(1-(2-cyclopropylbenzyl)piperidin-4-yl)-1-oxoisoindolin-2-yl)piperidine-2,6-dione;
[2337] 3-(5-(1-((1,3-dihydroisobenzofuran-5-yl)methyl)piperidin-4-yl)-1-oxoisoindolin-2-yl)piperidine-2,6-dione;
[2338] 3-(1-oxo-5-(1-(2-(trifluoromethyl)benzyl)piperidin-4-yl)isoindolin-2-yl)piperidine-2,6-dione;
[2339] 3-(5-(1-(3-isopropoxybenzyl)piperidin-4-yl)-1-oxoisoindolin-2-yl)piperidine-2,6-dione;
[2340] 3-(1-oxo-5-(1-(4-(thiophen-3-yl)benzyl)piperidin-4-yl)isoindolin-2-yl)piperidine-2,6-dione;
[2341] 3-(5-(1-(4-cyclopentylbenzyl)piperidin-4-yl)-1-oxoisoindolin-2-yl)piperidine-2,6-dione;
[2342] 3-(1-oxo-5-(1-(4-(pyrrolidin-1-yl)benzyl)piperidin-4-yl)isoindolin-2-yl)piperidine-2,6-dione;
[2343] 3-(5-(1-(4-fluorobenzyl)piperidin-4-yl)-1-oxoisoindolin-2-yl)piperidine-2,6-dione;
[2344] 3-(5-(1-(2,4-dichlorobenzyl)piperidin-4-yl)-1-oxoisoindolin-2-yl)piperidine-2,6-dione;
[2345] 3-(1-oxo-5-(1-(quinolin-8-ylmethyl)piperidin-4-yl)isoindolin-2-yl)piperidine-2,6-dione;
[2346] 3-(5-(1-((1-methyl-1H-pyrazol-4-yl)methyl)piperidin-4-yl)-1-oxoisoindolin-2-yl)piperidine-2,6-dione;
[2347] 3-(5-(1-((1H-pyrazol-4-yl)methyl)piperidin-4-yl)-1-oxoisoindolin-2-yl)piperidine-2,6-dione;
[2348] 3-(5-(1-((1-methyl-1H-pyrazol-3-yl)methyl)piperidin-4-yl)-1-oxoisoindolin-2-yl)piperidine-2,6-dione;
[2349] 3-(5-(1-((1H-pyrazol-3-yl)methyl)piperidin-4-yl)-1-oxoisoindolin-2-yl)piperidine-2,6-dione;
[2350] 3-(5-(1-((1H-pyrrol-3-yl)methyl)piperidin-4-yl)-1-oxoisoindolin-2-yl)piperidine-2,6-dione;
[2351] 3-(5-(1-((1H-imidazol-5-yl)methyl)piperidin-4-yl)-1-oxoisoindolin-2-yl)piperidine-2,6-dione;
[2352] 3-(5-(1-((1-ethyl-1H-pyrazol-3-yl)methyl)piperidin-4-yl)-1-oxoisoindolin-2-yl)piperidine-2,6-dione;
[2353] 3-(5-(1-((2-aminopyrimidin-5-yl)methyl)piperidin-4-yl)-1-oxoisoindolin-2-yl)piperidine-2,6-dione;
[2354] 3-(5-(1-((6-aminopyridin-3-yl)methyl)piperidin-4-yl)-1-oxoisoindolin-2-yl)piperidine-2,6-dione;
[2355] 3-(5-(1-((5-amino-1-methyl-1H-pyrazol-4-yl)methyl)piperidin-4-yl)-1-oxoisoindolin-2-yl)piperidine-2,6-dione;
[2356] 3-(5-(1-((6-methylimidazo[2,1-b]thiazol-5-yl)methyl)piperidin-4-yl)-1-oxoisoindolin-2-yl)piperidine-2,6-dione;
[2357] 3-(5-(1-(imidazo[1,2-a]pyrazin-3-ylmethyl)piperidin-4-yl)-1-oxoisoindolin-2-yl)piperidine-2,6-dione;
[2358] 3-(5-(1-([1,2,4]triazolo[1,5-a]pyridin-5-ylmethyl)piperidin-4-yl)-1-oxoisoindolin-2-yl)piperidine-2,6-dione;
[2359] 3-(1-oxo-5-(1-(pyrazolo[1,5-a]pyridin-4-ylmethyl)piperidin-4-yl)isoindolin-2-yl)piperidine-2,6-dione;
[2360] 3-(5-(1-((1,4-dimethyl-1H-imidazol-2-yl)methyl)piperidin-4-yl)-1-oxoisoindolin-2--yl)piperidine-2,6-dione;
[2361] 3-(5-(1-(benzo[d]thiazol-5-ylmethyl)piperidin-4-yl)-1-oxoisoindolin-2-yl)piperidine-2,6-dione;
[2362] 3-(1-oxo-5-(1-(pyrazolo[1,5-a]pyrimidin-6-ylmethyl)piperidin-4-yl)isoindolin-2-yl)piperidine-2,6-dione;
[2363] 3-(5-(1-(imidazo[1,2-a]pyrimidin-3-ylmethyl)piperidin-4-yl)-1-oxoisoindolin-2-yl)piperidine-2,6-dione;
[2364] 3-(5-(1-(imidazo[1,2-a]pyrimidin-2-ylmethyl)piperidin-4-yl)-1-oxoisoindolin-2-yl)piperidine-2,6-dione;
[2365] 3-(5-(1-((1-cyclobutyl-1H-1,2,3-triazol-4-yl)methyl)piperidin-4-yl)-1-oxoisoindolin-2-yl)piperidine-2,6-dione;
[2366] 3-(1-oxo-5-(1-((4,5,6,7-tetrahydropyrazolo[1,5-a]pyridin-2-yl)methyl)piperidin-4-yl)isoindolin-2-yl)piperidine-2,6-dione;
[2367] 3-(5-(1-((1H-indol-2-yl)methyl)piperidin-4-yl)-1-oxoisoindolin-2-yl)piperidine-2,6-dione;
[2368] 3-(5-(1-((1H-indazol-6-yl)methyl)piperidin-4-yl)-1-oxoisoindolin-2-yl)piperidine-2,6-dione;
[2369] 3-(5-(1-((1H-pyrrolo[2,3-b]pyridin-3-yl)methyl)piperidin-4-yl)-1-oxoisoindolin-2-yl)piperidine-2,6-dione; 3-((4-(2-(2,6-dioxopiperidin-3-yl)-1-oxoisoindolin-5-yl)piperidin-1-yl)methyl)benzamide;
[2370] 3-(5-(1-((1H-pyrrolo[2,3-b]pyridin-6-yl)methyl)piperidin-4-yl)-1-oxoisoindolin-2-yl)piperidine-2,6-dione;
[2371] 3-(5-(1-((3,4-dihydro-2H-benzo[b][1,4]thiazin-6-yl)methyl)piperidin-4-yl)-1-oxoisoindolin-2-yl)piperidine-2,6-dione;
[2372] 3-(1-oxo-5-(1-((2-(pyrrolidin-1-yl)pyrimidin-5-yl)methyl)piperidin-4-yl)isoindolin-2-yl)piperidine-2,6-dione;
[2373] 3-(5-(1-((2-(tert-butyl)thiazol-4-yl)methyl)piperidin-4-yl)-1-oxoisoindolin-2-yl)piperidine-2,6-dione;
[2374] 3-(1-oxo-5-(1-((2-(thiophen-2-yl)thiazol-5-yl)methyl)piperidin-4-yl)isoindolin-2-yl)piperidine-2,6-dione;
[2375] 3-(5-(1-((5-cyclopropyl-1H-pyrazol-3-yl)methyl)piperidin-4-yl)-1-oxoisoindolin-2-yl)piperidine-2,6-dione;
[2376] 3-(5-(1-((2-morpholinopyrimidin-5-yl)methyl)piperidin-4-yl)-1-oxoisoindolin-2-yl)piperidine-2,6-dione;
[2377] 3-(1-oxo-5-(1-((3-phenyl-1H-pyrazol-4-yl)methyl)piperidin-4-yl)isoindolin-2-yl)piperidine-2,6-dione;
[2378] 3-(5-(1-((6-methyl-1H-indol-3-yl)methyl)piperidin-4-yl)-1-oxoisoindolin-2-yl)piperidine-2,6-dione;
[2379] methyl 4-((4-(2-(2,6-dioxopiperidin-3-yl)-1-oxoisoindolin-5-yl)piperidin-1-yl)methyl)-1H-pyrrole-2-carboxylate;
[2380] 3-(1-oxo-5-(1-((3-(pyridin-3-yl)-1H-pyrazol-4-yl)methyl)piperidin-4-yl)isoindolin-2-yl)piperidine-2,6-dione;
[2381] 3-(1-oxo-5-(1-((5-(pyridin-2-yl)-1H-pyrazol-3-yl)methyl)piperidin-4-yl)isoindolin-2-yl)piperidine-2,6-dione;
[2382] 3-(5-(1-(3,5-difluoro-4-hydroxybenzyl)piperidin-4-yl)-1-oxoisoindolin-2-yl)piperidine-2,6-dione;
[2383] 3-(5-(1-(2-methylbenzyl)piperidin-4-yl)-1-oxoisoindolin-2-yl)piperidine-2,6-dione;
[2384] 3-(5-(1-(4-methylbenzyl)piperidin-4-yl)-1-oxoisoindolin-2-yl)piperidine-2,6-dione;
[2385] 3-(5-(1-(3,5-dimethylbenzyl)piperidin-4-yl)-1-oxoisoindolin-2-yl)piperidine-2,6-dione;
[2386] 3-(5-((2S)-1-benzyl-2-methylpiperidin-4-yl)-1-oxoisoindolin-2-yl)piperidine-2,6-dione;
[2387] 3-(5-((2R)-1-benzyl-2-methylpiperidin-4-yl)-1-oxoisoindolin-2-yl)piperidine-2,6-dione;
[2388] 3-(5-(1-benzyl-2-methylpiperidin-4-yl)-1-oxoisoindolin-2-yl)piperidine-2,6-dione;
[2389] 3-(5-(1-methyl-1,2,3,6-tetrahydropyridin-4-yl)-1-oxoisoindolin-2-yl)piperidine-2,6-dione;
[2390] 3-(1-oxo-5-(1-((5,6,7,8-tetrahydronaphthalen-1-yl)methyl)piperidin-4-yl)isoindolin-2-yl)piperidine-2,6-dione;
[2391] 3-(5-(azepan-4-yl)-1-oxoisoindolin-2-yl)piperidine-2,6-dione;
[2392] 3-(5-((R)-azepan-4-yl)-1-oxoisoindolin-2-yl)piperidine-2,6-dione;
[2393] 3-(5-((S)-azepan-4-yl)-1-oxoisoindolin-2-yl)piperidine-2,6-dione;
[2394] 3-(1-oxo-5-(1-((1,2,3,4-tetrahydronaphthalen-1-yl)methyl)piperidin-4-yl)isoindolin-2-yl)piperidine-2,6-dione;
[2395] methyl 2-(4-(2-(2,6-dioxopiperidin-3-yl)-1-oxoisoindolin-5-yl)piperidin-1-yl)acetate;
[2396] 3-(1-oxo-5-(1-phenylpiperidin-4-yl)isoindolin-2-yl)piperidine-2,6-dione;
[2397] 3-(5-(1-(3-methylbenzyl)piperidin-4-yl)-1-oxoisoindolin-2-yl)piperidine-2,6-dione;
[2398] 3-(5-(1-(2,6-dimethylbenzyl)piperidin-4-yl)-1-oxoisoindolin-2-yl)piperidine-2,6-dione;
[2399] 3-(1-oxo-5-(1-((5,6,7,8-tetrahydronaphthalen-2-yl)methyl)piperidin-4-yl)isoindolin-2-yl)piperidine-2,6-dione;
[2400] ethyl 2-(4-(2-(2,6-dioxopiperidin-3-yl)-1-oxoisoindolin-5-yl)piperidin-1-yl)acetate;
[2401] tert-butyl 2-(4-(2-(2,6-dioxopiperidin-3-yl)-1-oxoisoindolin-5-yl)piperidin-1-yl)acetate;
[2402] 2-(4-(2-(2,6-dioxopiperidin-3-yl)-1-oxoisoindolin-5-yl)piperidin-1-yl)acetic acid;
[2403] 3-(1-oxo-5-(1-(3,3,3-trifluoropropyl)piperidin-4-yl)isoindolin-2-yl)piperidine-2,6-dione;
[2404] 2-(4-(2-(2,6-dioxopiperidin-3-yl)-1-oxoisoindolin-5-yl)piperidin-1-yl)-N-phenylacetamide;
[2405] 3-(5-(1-(3-fluoropropyl)piperidin-4-yl)-1-oxoisoindolin-2-yl)piperidine-2,6-dione;
[2406] tert-butyl 4-((4-(2-(2,6-dioxopiperidin-3-yl)-1-oxoisoindolin-5-yl)piperidin-1-yl)methyl)benzoate;
[2407] 3-(5-(1-benzyl-3,3-dimethylpiperidin-4-yl)-1-oxoisoindolin-2-yl)piperidine-2,6-dione;
[2408] 3-(5-(1-benzyl-3-methylpiperidin-4-yl)-1-oxoisoindolin-2-yl)piperidine-2,6-dione;
[2409] 3-(5-(1-(2-hydroxy-1-phenylethyl)piperidin-4-yl)-1-oxoisoindolin-2-yl)piperidine-2,6-dione;
[2410] 3-(5-((S)-1-benzylazepan-4-yl)-1-oxoisoindolin-2-yl)piperidine-2,6-dione;
[2411] 3-(5-(1-benzyl-2,5-dihydro-1H-pyrrol-3-yl)-1-oxoisoindolin-2-yl)piperidine-2,6-dione;
[2412] 3-(5-(1-benzyl-2-oxopiperidin-4-yl)-1-oxoisoindolin-2-yl)piperidine-2,6-dione;
[2413] 3-(5-(1-benzyl-1,2,3,4-tetrahydroquinolin-4-yl)-1-oxoisoindolin-2-yl)piperidine-2,6-dione;
[2414] 3-(5-(1-((1-benzyl-1H-tetrazol-5-yl)methyl)piperidin-4-yl)-1-oxoisoindolin-2-yl)piperidine-2,6-dione;
[2415] 3-(1-oxo-5-(1-((5-phenyl-1,3,4-oxadiazol-2-yl)methyl)piperidin-4-yl)isoindolin-2-yl)piperidine-2,6-dione;
[2416] 3-(5-(1-(benzo[d]thiazol-2-ylmethyl)piperidin-4-yl)-1-oxoisoindolin-2-yl)piperidine-2,6-dione;
[2417] 3-(1-oxo-5-(1-((3-(pyridin-2-yl)-1H-pyrazol-5-yl)methyl)piperidin-4-yl)isoindolin-2-yl)piperidine-2,6-dione;
[2418] 3-(5-(1-((R)-2-hydroxy-1-phenylethyl)piperidin-4-yl)-1-oxoisoindolin-2-yl)piperidine-2,6-dione;
[2419] 3-(5-(1-((1-methyl-1H-indazol-3-yl)methyl)piperidin-4-yl)-1-oxoisoindolin-2-yl)piperidine-2,6-dione;
[2420] 3-(5-(1-((1,2,4-oxadiazol-3-yl)methyl)piperidin-4-yl)-1-oxoisoindolin-2-yl)piperidine-2,6-dione;
[2421] 3-(5-(1-(4-hydroxy-3-((4-methylpiperazin-1-yl)methyl)benzyl)piperidin-4-yl)-1-oxoisoindolin-2-yl)piperidine-2,6-dione; 2-(4-((4-(2-(2,6-dioxopiperidin-3-yl)-1-oxoisoindolin-5-yl)piperidin-1-yl)methyl)phenyl)acetonitrile;
[2422] 3-(5-(1-((7-hydroxy-2-methylpyrazolo[1,5-a]pyrimidin-5-yl)methyl)piperidin-4-yl)-1-oxoisoindolin-2-yl)piperidine-2,6-dione;
[2423] 3-(5-(1-(2,2-difluoro-1-phenylethyl)piperidin-4-yl)-1-oxoisoindolin-2-yl)piperidine-2,6-dione;
[2424] 3-(5-(1-((3-fluorobicyclo[1.1.1]pentan-1-yl)methyl)piperidin-4-yl)-1-oxoisoindolin-2-yl)piperidine-2,6-dione;
[2425] 3-(5-(1-(2-fluoro-1-phenylethyl)piperidin-4-yl)-1-oxoisoindolin-2-yl)piperidine-2,6-dione;
[2426] 3-(1-oxo-5-(1-((4-oxo-3,4-dihydrothieno[3,2-d]pyrimidin-2-yl)methyl)piperidin-4-yl)isoindolin-2-yl)piperidine-2,6-dione;
[2427] 3-(1-oxo-5-(1-(quinolin-4-ylmethyl)piperidin-4-yl)isoindolin-2-yl)piperidine-2,6-dione;
[2428] 3-(5-(1-(3,5-bis(trifluoromethyl)benzyl)piperidin-4-yl)-1-oxoisoindolin-2-yl)piperidine-2,6-dione;
[2429] 6-((4-(2-(2,6-dioxopiperidin-3-yl)-1-oxoisoindolin-5-yl)piperidin-1-yl)methyl)picolinonitrile;
[2430] 2-(4-((4-(2-(2,6-dioxopiperidin-3-yl)-1-oxoisoindolin-5-yl)piperidin-1-yl)methyl)phenoxy)acetonitrile;
[2431] 3-(5-(1-((1H-indazol-5-yl)methyl)piperidin-4-yl)-1-oxoisoindolin-2-yl)piperidine-2,6-dione;
[2432] 3-(5-(1-(2,2-difluoroethyl)piperidin-4-yl)-1-oxoisoindolin-2-yl)piperidine-2,6-dione;
[2433] 3-(5-(1-((7-methyl-4-oxo-4H-pyrido[1,2-a]pyrimidin-2-yl)methyl)piperidin-4-yl)-1-oxoisoindolin-2-yl)piperidine-2,6-dione;
[2434] benzyl 4-(2-(2,6-dioxopiperidin-3-yl)-1-oxoisoindolin-5-yl)piperidine-1-carboxylate;
[2435] 3-(1-oxo-5-(1-(2-phenylacetyl)piperidin-4-yl)isoindolin-2-yl)piperidine-2,6-dione;
[2436] 3-(1-oxo-5-(1-(2,2,2-trifluoro-1-phenylethyl)piperidin-4-yl)isoindolin-2-yl)piperidine-2,6-dione;
[2437] 3-(5-(1-(4-(5-methylbenzo[d]thiazol-2-yl)benzyl)piperidin-4-yl)-1-oxoisoindolin-2-yl)piperidine-2,6-dione;
[2438] 3-(5-(1-(isoquinolin-1-ylmethyl)piperidin-4-yl)-1-oxoisoindolin-2-yl)piperidine-2,6-dione;
[2439] 3-(5-(1-(4-(4-methoxypiperidin-1-yl)benzyl)piperidin-4-yl)-1-oxoisoindolin-2-yl)piperidine-2,6-dione;
[2440] 3-(5-(1-(4-(isopropylthio)benzyl)piperidin-4-yl)-1-oxoisoindolin-2-yl)piperidine-2,6-dione;
[2441] 3-(1-oxo-5-(1-((S)-1-phenylethyl)piperidin-4-yl)isoindolin-2-yl)piperidine-2,6-dione;
[2442] 2-(4-((4-(2-(2,6-dioxopiperidin-3-yl)-1-oxoisoindolin-5-yl)piperidin-1-yl)methyl)phenyl)acetic acid;
[2443] 3-(5-(1-((7-fluoroquinolin-2-yl)methyl)piperidin-4-yl)-1-oxoisoindolin-2-yl)piperidine-2,6-dione;
[2444] 3-(5-(1-((2-amino-4-(trifluoromethyl)thiazol-5-yl)methyl)piperidin-4-yl)-1-oxoisoindolin-2-yl)piperidine-2,6-dione;
[2445] 3-((4-(2-(2,6-dioxopiperidin-3-yl)-1-oxoisoindolin-5-yl)piperidin-1-yl)methyl)-1,2,4-oxadiazole-5-carboxamide;
[2446] 3-(5-(1-(3-(morpholinosulfonyl)benzyl)piperidin-4-yl)-1-oxoisoindolin-2-yl)piperidine-2,6-dione;
[2447] 4-((4-(2-(2,6-dioxopiperidin-3-yl)-1-oxoisoindolin-5-yl)piperidin-1-yl)methyl)-N,N-dimethylbenzenesulfonamide;
[2448] 3-(1-oxo-5-(1-(thiazol-4-ylmethyl)piperidin-4-yl)isoindolin-2-yl)piperidine-2,6-dione;
[2449] 3-(1-oxo-5-(1-(quinoxalin-6-ylmethyl)piperidin-4-yl)isoindolin-2-yl)piperidine-2,6-dione;
[2450] 3-(5-(1-(4-(tert-butyl)benzoyl)piperidin-4-yl)-1-oxoisoindolin-2-yl)piperidine-2,6-dione;
[2451] 3-(5-(1-(4-((4-fluorobenzyl)oxy)benzyl)piperidin-4-yl)-1-oxoisoindolin-2-yl)piperidine-2,6-dione;
[2452] 3-(5-(1-((3-methylisoxazol-5-yl)methyl)piperidin-4-yl)-1-oxoisoindolin-2-yl)piperidine-2,6-dione;
[2453] 3-(5-(1-(isoxazol-3-ylmethyl)piperidin-4-yl)-1-oxoisoindolin-2-yl)piperidine-2,6-dione;
[2454] 3-(1-oxo-5-(1-((R)-1-phenylethyl)piperidin-4-yl)isoindolin-2-yl)piperidine-2,6-dione;
[2455] 3-(5-(1-(4-(methoxymethyl)benzyl)piperidin-4-yl)-1-oxoisoindolin-2-yl)piperidine-2,6-dione;
[2456] 3-(5-(1-((S)-2-hydroxy-1-phenylethyl)piperidin-4-yl)-1-oxoisoindolin-2-yl)piperidine-2,6-dione;
[2457] 3-(1-oxo-5-(1-(phenylsulfonyl)piperidin-4-yl)isoindolin-2-yl)piperidine-2,6-dione;
[2458] 3-(5-(1-((5-methyl-3-phenylisoxazol-4-yl)methyl)piperidin-4-yl)-1-oxoisoindolin-2-yl)piperidine-2,6-dione;
[2459] 3-(5-(1-(4-((difluoromethyl)sulfonyl)benzyl)piperidin-4-yl)-1-oxoisoindolin-2-yl)piperidine-2,6-dione;
[2460] 3-(1-oxo-5-(1-(2,2,2-trifluoroethyl)piperidin-4-yl)isoindolin-2-yl)piperidine-2,6-dione;
[2461] methyl 2-((4-(2-(2,6-dioxopiperidin-3-yl)-1-oxoisoindolin-5-yl)piperidin-1-yl)methyl)oxazole-4-carboxylate;
[2462] 3-(1-oxo-5-(1-(4-(pyridin-2-ylmethoxy)benzyl)piperidin-4-yl)isoindolin-2-yl)piperidine-2,6-dione;
[2463] 3-(5-(1-acetylpiperidin-4-yl)-1-oxoisoindolin-2-yl)piperidine-2,6-dione;
[2464] 3-(1-oxo-5-(1-((2-oxo-2,3-dihydro-1H-benzo[d]imidazol-5-yl)methyl)piperidin-4-yl)isoindolin-2-yl)piperidine-2,6-dione;
[2465] 3-(5-(1-benzylpyrrolidin-3-yl)-1-oxoisoindolin-2-yl)piperidine-2,6-dione;
[2466] (R)-3-(5-((R)-1-benzylazepan-4-yl)-1-oxoisoindolin-2-yl)piperidine-2,6-dione;
[2467] (S)-3-(5-((S)-1-benzylazepan-4-yl)-1-oxoisoindolin-2-yl)piperidine-2,6-dione;
[2468] 3-(5-(1-benzylazepan-4-yl)-1-oxoisoindolin-2-yl)piperidine-2,6-dione;
[2469] 3-(5-(1-methyl-2,3,6,7-tetrahydro-1H-azepin-4-yl)-1-oxoisoindolin-2-yl)piperidine-2,6-dione;
[2470] 3-(5-(8-benzyl-8-azabicyclo[3.2.1]octan-3-yl)-1-oxoisoindolin-2-yl)piperidine-2,6-dione;
[2471] 3-(5-(8-azabicyclo[3.2.1]octan-3-yl)-1-oxoisoindolin-2-yl)piperidine-2,6-dione;
[2472] 3-(5-(1-acetyl-1,2,5,6-tetrahydropyridin-3-yl)-1-oxoisoindolin-2-yl)piperidine-2,6-dione; (R)-3-(5-((R)-1-acetylpyrrolidin-3-yl)-1-oxoisoindolin-2-yl)piperidine-2,6-dione;
[2473] 3-(5-(1-acetyl-1,2,3,6-tetrahydropyridin-4-yl)-1-oxoisoindolin-2-yl)piperidine-2,6-dione;
[2474] 3-(5-(octahydroindolizin-7-yl)-1-oxoisoindolin-2-yl)piperidine-2,6-dione;
[2475] (R)-3-(5-((S)-1-benzylazepan-4-yl)-1-oxoisoindolin-2-yl)piperidine-2,6-dione;
[2476] 3-(5-((R)-1-benzylazepan-4-yl)-1-oxoisoindolin-2-yl)piperidine-2,6-dione;
[2477] 3-(5-(1-acetyl-2,5-dihydro-1H-pyrrol-3-yl)-1-oxoisoindolin-2-yl)piperidine-2,6-dione;
[2478] 3-(5-(1-methylazepan-4-yl)-1-oxoisoindolin-2-yl)piperidine-2,6-dione;
[2479] (S)-3-(5-((R)-1-benzylazepan-4-yl)-1-oxoisoindolin-2-yl)piperidine-2,6-dione;
[2480] (S)-3-(5-((R)-1-acetylpyrrolidin-3-yl)-1-oxoisoindolin-2-yl)piperidine-2,6-dione;
[2481] 3-(5-(1-((6-isopropoxypyridin-3-yl)methyl)piperidin-4-yl)-1-oxoisoindolin-2-yl)piperidine-2,6-dione;
[2482] 3-(1-oxo-5-(1-((1-phenyl-1H-pyrazol-5-yl)methyl)piperidin-4-yl)isoindolin-2-yl)piperidine-2,6-dione;
[2483] 3-(5-(1-(4-ethoxybenzyl)piperidin-4-yl)-1-oxoisoindolin-2-yl)piperidine-2,6-dione;
[2484] 3-(1-oxo-5-(1-((1-phenyl-1H-pyrazol-4-yl)methyl)piperidin-4-yl)isoindolin-2-yl)piperidine-2,6-dione;
[2485] 3-(5-(1-((1-isopropyl-1H-pyrazol-5-yl)methyl)piperidin-4-yl)-1-oxoisoindolin-2-yl)piperidine-2,6-dione;
[2486] 3-(5-(1-(isothiazol-5-ylmethyl)piperidin-4-yl)-1-oxoisoindolin-2-yl)piperidine-2,6-dione;
[2487] 3-(5-(1-((1-isopropyl-1H-pyrazol-4-yl)methyl)piperidin-4-yl)-1-oxoisoindolin-2-yl)piperidine-2,6-dione;
[2488] 3-(5-(1-((1H-pyrazol-5-yl)methyl)piperidin-4-yl)-1-oxoisoindolin-2-yl)piperidine-2,6-dione;
[2489] 3-(5-(1-((5-isopropoxypyridin-2-yl)methyl)piperidin-4-yl)-1-oxoisoindolin-2-yl)piperidine-2,6-dione;
[2490] 3-(1-oxo-5-(1-((1-(pyridin-3-yl)-1H-pyrazol-5-yl)methyl)piperidin-4-yl)isoindolin-2-yl)piperidine-2,6-dione;
[2491] 3-(1-oxo-5-(1-((1-(pyridin-3-yl)-1H-pyrazol-4-yl)methyl)piperidin-4-yl)isoindolin-2-yl)piperidine-2,6-dione;
[2492] 5-((4-(2-(2,6-dioxopiperidin-3-yl)-1-oxoisoindolin-5-yl)piperidin-1-yl)methyl)-2-fluorobenzonitrile;
[2493] 3-(5-(1-((5-fluoropyridin-2-yl)methyl)piperidin-4-yl)-1-oxoisoindolin-2-yl)piperidine-2,6-dione;
[2494] 3-(5-(1-((1-ethyl-3-(pyridin-3-yl)-1H-pyrazol-4-yl)methyl)piperidin-4-yl)-1-oxoisoindolin-2-yl)piperidine-2,6-dione;
[2495] trans-3-(1-oxo-5-(1-((4-(trifluoromethyl)cyclohexyl)methyl)piperidin-4-yl)isoindolin-2-yl)piperidine-2,6-dione;
[2496] cis-3-(1-oxo-5-(1-((4-(trifluoromethyl)cyclohexyl)methyl)piperidin-4-yl)isoindolin-2-yl)piperidine-2,6-dione;
[2497] trans-3-(5-(1-((4-methoxycyclohexyl)methyl)piperidin-4-yl)-1-oxoisoindolin-2-yl)piperidine-2,6-dione; and
[2498] 3-(5-(1-((6-methoxypyridin-2-yl)methyl)piperidin-4-yl)-1-oxoisoindolin-2-yl)piperidine-2,6-dione;
   [2499] or a pharmaceutically acceptable salt, hydrate, solvate, prodrug, stereoisomer, or tautomer thereof.

[2500] Other IKZF2 inhibitors are described in U.S. Pat. No. 10,414,755, which is incorporated by reference in its entirety.

[2501] In some embodiments, the IKZF2 inhibitor comprises a compound of Formula (Ic):

[chemical structure]

[2502] or a pharmaceutically acceptable salt, hydrate, solvate, prodrug, stereoisomer, or tautomer thereof,
[2503] wherein:
[2504] each R₁ is independently (C₁-C₆)alkyl;
[2505] R₂ is (C₁-C₆)alkyl substituted with one to three R₄;
[2506] each R₄ is independently selected from (C₆-C₁₀)aryl and (C₃-C₈)cycloalkyl, wherein the aryl and cycloalkyl groups are optionally substituted with one or more R₇;
[2507] each R₇ is independently selected from (C₁-C₆)alkyl, (C₂-C₆)alkenyl, (C₂-C₆)alkynyl, (C₁-C₆)alkoxy, (C₁-C₆)haloalkyl, (C₁-C₆)haloalkoxy, —C(O)R₈, —C(O)OR₈, —C(O)NR₈R₉, —NR₈C(O)R₉, (C₁-C₆)hydroxyalkyl, halogen, —OH, —NH₂, CN, (C₆-C₁₀)aryl, 5- or 6-membered heteroaryl comprising 1 to 3 heteroatoms selected from O, N, and S, (C₃-C₇)cycloalkyl, and 5- to 7-membered heterocycloalkyl comprising 1 to 3 heteroatoms selected from O, N, and S, or
[2508] two R₇, when on adjacent atoms, together with the atoms to which they are attached form a (C₆-C₁₀)aryl ring or a 5- or 6-membered heteroaryl ring comprising 1 to 3 heteroatoms selected from O, N, and S, optionally substituted with one or more R₁₀, or
[2509] two R₇, when on adjacent atoms, together with the atoms to which they are attached form a (C₅-C₇)cycloalkyl ring or a 5- to 7-membered heterocycloalkyl ring comprising 1 to 3 heteroatoms selected from O, N, and S, optionally substituted with one or more R₁₀;
[2510] R₈ and R₉ are each independently H or (C₁-C₆)alkyl;
[2511] each R₁₀ is independently selected from (C₁-C₆)alkyl, (C₁-C₆)alkoxy, (C₁-C₆)haloalkyl, (C₁-C₆)haloalkoxy, (C₁-C₆)hydroxyalkyl, halogen, —OH, —NH₂, and CN; and
[2512] q is 0.

[2513] In some embodiments, R₄ is phenyl or (C₃-C₈)cycloalkyl optionally substituted with one to three R₇. In some embodiments, R₄ is phenyl optionally substituted with one to three R₇. In some embodiments, R₄ is (C₃-C₈)cycloalkyl optionally substituted with one to three R₇.

[2514] In some embodiments, the IKZF2 inhibitor comprises a compound selected from:

[chemical structure]

[chemical structure]

[2515] or a pharmaceutically acceptable salt, hydrate, solvate, prodrug, stereoisomer, or tautomer thereof.

[2516] In some embodiments, the compound is compound (I-156):

[chemical structure]

[2517] or a pharmaceutically acceptable salt, hydrate, solvate, prodrug, stereoisomer, or tautomer thereof.

[2518] In some embodiments, the compound is compound (I-57):

[chemical structure]

[2519] or a pharmaceutically acceptable salt, hydrate, solvate, prodrug, stereoisomer, or tautomer thereof.

[2520] In some embodiments, the compound is compound (I-87):

[chemical structure]

[2521] or a pharmaceutically acceptable salt, hydrate, solvate, prodrug, stereoisomer, or tautomer thereof.

[2522] In some embodiments, the compound is compound (I-88):

[chemical structure]

[2523] or a pharmaceutically acceptable salt, hydrate, solvate, prodrug, stereoisomer, or tautomer thereof.

[2524] In some embodiments, the compound is compound (I-112):

[chemical structure]

[2525] or a pharmaceutically acceptable salt, hydrate, solvate, prodrug, stereoisomer, or tautomer thereof.

[2526] In some embodiments, the compound is compound (I-303):

[chemical structure]

[2527] or a pharmaceutically acceptable salt, hydrate, solvate, prodrug, stereoisomer, or tautomer thereof.

[2528] In some embodiments, the compound is compound (I-11):

[chemical structure]

[2529] or a pharmaceutically acceptable salt, hydrate, solvate, prodrug, stereoisomer, or tautomer thereof.

[2530] In some embodiments, the IKZF2 inhibitor comprises a compound of Formula (Ic):

[chemical structure]

[2531] or a pharmaceutically acceptable salt, hydrate, solvate, prodrug, stereoisomer, or tautomer thereof,
[2532] wherein:
[2533] each R₁ is independently (C₁-C₆)alkyl;
[2534] R₂ is (C₁-C₆)alkyl substituted with one to three R₄;
[2535] each R₄ is independently selected from phenyl or 5- or 6-membered heteroaryl comprising 1 to 4 heteroatoms selected from O, N, and S, wherein the phenyl and heteroaryl groups are optionally substituted with one to three R₇;
[2536] each R₇ is independently selected from (C₁-C₆)alkyl, (C₂-C₆)alkenyl, (C₂-C₆)alkynyl, (C₁-C₆)alkoxy, (C₁-C₆)haloalkyl, (C₁-C₆)haloalkoxy, —C(O)R₈, —C(O)OR₈, —C(O)NR₈R₉, —NR₈C(O)R₉, (C₁-C₆)hydroxyalkyl, halogen, —OH, —NH₂, CN, (C₆-C₁₀)aryl, 5- or 6-membered heteroaryl comprising 1 to 3 heteroatoms selected from O, N, and S, (C₃-C₇)cycloalkyl, and 5- to 7-membered heterocycloalkyl comprising 1 to 3 heteroatoms selected from O, N, and S, or
[2537] two R₇, when on adjacent atoms, together with the atoms to which they are attached form a (C₆-C₁₀)aryl ring or a 5- or 6-membered heteroaryl ring comprising 1 to 3 heteroatoms selected from O, N, and S, optionally substituted with one or more R₁₀, or
[2538] two R₇, when on adjacent atoms, together with the atoms to which they are attached form a (C₅-C₇)cycloalkyl ring or a 5- to 7-membered heterocycloalkyl ring comprising 1 to 3 heteroatoms selected from O, N, and S, optionally substituted with one or more R₁₀;
[2539] R₈ and R₉ are each independently H or (C₁-C₆)alkyl;
[2540] each R₁₀ is independently selected from (C₁-C₆)alkyl, (C₁-C₆)alkoxy, (C₁-C₆)haloalkyl, (C₁-C₆)haloalkoxy, (C₁-C₆)hydroxyalkyl, halogen, —OH, —NH₂, and CN; and
[2541] q is 0.

[2542] In some embodiments, R₄ is phenyl substituted with one to three R₇. In some embodiments, R₄ is 5-membered heteroaryl comprising 1 to 3 heteroatoms selected from O, N, and S, are optionally substituted with one to three R₇. In some embodiments, R₄ is 6-membered heteroaryl comprising 1 to 3 heteroatoms selected from O, N, and S, optionally substituted with one to three R₇.

[2543] In some embodiments, the compound is selected from:

[chemical structure]

[chemical structure]

[2544] or a pharmaceutically acceptable salt, hydrate, solvate, prodrug, stereoisomer, or tautomer thereof.

[2545] In some embodiments, the IKZF2 inhibitor comprises a compound of Formula (I′):

[chemical structure]

[2546] or a pharmaceutically acceptable salt, hydrate, solvate, prodrug, stereoisomer, or tautomer thereof,
[2547] wherein:
[2548] X₁ is CR₃;
[2549] [symbol] is optionally a double bond when X₁ is CR₃ and R₃ is absent;
[2550] each R₁ is independently (C₁-C₆)alkyl, (C₁-C₆)haloalkyl, (C₁-C₆)hydroxyalkyl, or halogen, or
[2551] two R₁ together with the carbon atoms to which they are attached form a 5- or 6-membered heterocycloalkyl ring, or
[2552] two R₁, when on adjacent atoms, together with the atoms to which they are attached form a (C₆-C₁₀)aryl ring or a 5- or 6-membered heteroaryl ring comprising 1 to 3 heteroatoms selected from O, N, and S;
[2553] R₂ is (C₁-C₆)alkyl, —C(O)(C₁-C₆)alkyl, —C(O)(CH₂)₀₋₃(C₆-C₁₀)aryl, —C(O)O(CH₂)₀₋₃(C₆-C₁₀)aryl, (C₆-C₁₀)aryl, 5- or 6-membered heteroaryl comprising 1 to 3 heteroatoms selected from O, N, and S, (C₃-C₈)cycloalkyl, or 5- to 7-membered heterocycloalkyl comprising 1 to 3 heteroatoms selected from O, N, and S, wherein the alkyl is optionally substituted with one or more R₄; and the aryl, heteroaryl, cycloalkyl, and heterocycloalkyl are optionally substituted with one or more R₅, or
[2554] R₁ and R₂, when on adjacent atoms, together with the atoms to which they are attached form a 5- or 6-membered heterocycloalkyl ring;
[2555] R₃ is H or R₃ is absent when [symbol] is a double bond;
[2556] each R₄ is independently selected from —C(O)OR₆, —C(O)NR₆R₆, —NR₆C(O)R₆, halogen, —OH, —NH₂, CN, (C₆-C₁₀)aryl, 5- or 6-membered heteroaryl comprising 1 to 4 heteroatoms selected from O, N, and S, (C₃-C₈)cycloalkyl, and 5- to 7-membered heterocycloalkyl ring comprising 1 to 3 heteroatoms selected from O, N, and S, wherein the aryl, heteroaryl, cycloalkyl, and heterocycloalkyl groups are optionally substituted with one or more R₇;
[2557] each R₈ is independently selected from (C₁-C₆)alkyl, (C₂-C₆)alkenyl, (C₂-C₆)alkynyl, (C₁-C₆)alkoxy, (C₁-C₆)haloalkyl, (C₁-C₆)haloalkoxy, (C₁-C₆)hydroxyalkyl, halogen, —OH, —NH₂, CN, (C₃-C₇)cycloalkyl, 5- to 7-membered heterocycloalkyl comprising 1 to 3 heteroatoms selected from O, N, and S, (C₆-C₁₀)aryl, and 5- or 6-membered heteroaryl comprising 1 to 3 heteroatoms selected from O, N, and S, or
[2558] two R₅, when on adjacent atoms, together with the atoms to which they are attached form a (C₆-C₁₀)aryl ring or a 5- or 6-membered heteroaryl ring comprising 1 to 3 heteroatoms selected from O, N, and S, optionally substituted with one or more R₁₀, or
[2559] two R₅, when on adjacent atoms, together with the atoms to which they are attached form a (C₅-C₇)cycloalkyl ring or a 5- to 7-membered heterocycloalkyl ring comprising 1 to 3 heteroatoms selected from O, N, and S optionally substituted with one or more R₁₀;
[2560] R₆ and R₆ are each independently H, (C₁-C₆)alkyl, or (C₆-C₁₀)aryl;
[2561] each R₇ is independently selected from (C₁-C₆)alkyl, (C₂-C₆)alkenyl, (C₂-C₆)alkynyl, (C₁-C₆)alkoxy, (C₁-C₆)haloalkyl, (C₁-C₆)haloalkoxy, —C(O)R₈, —(CH₂)₀₋₃C(O)OR₈, —C(O)NR₈R₉, —NR₈C(O)R₉, —NR₈C(O)OR₉, —S(O)ₚNR₈R₉, —S(O)ₚR₁₂, (C₁-C₆)hydroxyalkyl, halogen, —OH, —O(CH₂)₁₋₃CN, —NH₂, CN, —O(CH₂)₀₋₃(C₆-C₁₀)aryl, adamantyl, —O(CH₂)₀₋₃-5- or 6-membered heteroaryl comprising 1 to 3 heteroatoms selected from O, N, and S, (C₆-C₁₀)aryl, monocyclic or bicyclic 5- to 10-membered heteroaryl comprising 1 to 3 heteroatoms selected from O, N, and S, (C₃-C₇)cycloalkyl, and 5- to 7-membered heterocycloalkyl comprising 1 to 3 heteroatoms selected from O, N, and S, wherein the alkyl is optionally substituted with one or more Rₗₗ, and the aryl, heteroaryl, and heterocycloalkyl are optionally substituted with one or more substituents each independently selected from halogen, (C₁-C₆)alkyl, (C₁-C₆)haloalkyl, and (C₁-C₆)alkoxy, or
[2562] two R₇ together with the carbon atom to which they are attached form a=(O), or
[2563] two R₇, when on adjacent atoms, together with the atoms to which they are attached form a (C₆-C₁₀)aryl ring or a 5- or 6-membered heteroaryl ring comprising 1 to 3 heteroatoms selected from O, N, and S, optionally substituted with one or more R₁₀, or
[2564] two R₇ together with the atoms to which they are attached form a (C₅-C₇) cycloalkyl ring or a 5- to 7-membered heterocycloalkyl ring comprising 1 to 3 heteroatoms selected from O, N, and S, optionally substituted with one or more R₁₀;
[2565] R₈ and R₉ are each independently H or (C₁-C₆)alkyl;
[2566] each R₁₀ is independently selected from (C₁-C₆)alkyl, (C₁-C₆)alkoxy, (C₁-C₆)haloalkyl, (C₁-C₆)haloalkoxy, (C₁-C₆)hydroxyalkyl, halogen, —OH, —NH₂, and CN, or
[2567] two R₁₀ together with the carbon atom to which they are attached form a=(O);
[2568] each R₁₁ is independently selected from CN, (C₁-C₆)alkoxy, (C₆-C₁₀)aryl, and 5- to 7-membered heterocycloalkyl comprising 1 to 3 heteroatoms selected from O, N, and S, wherein the aryl and heterocycloalkyl are optionally substituted with one or more substituents each independently selected from (C₁-C₆)alkyl, (C₁-C₆)alkoxy, (C₁-C₆)haloalkyl, (C₁-C₆)haloalkoxy, (C₁-C₆)hydroxyalkyl, halogen, —OH, —NH₂, and CN;
[2569] R₁₂ is (C₁-C₆)alkyl, (C₁-C₆)haloalkyl, (C₆-C₁₀)aryl, or 5- to 7-membered heterocycloalkyl comprising 1 to 3 heteroatoms selected from O, N, and S;
[2570] Rₓ is H or D;
[2571] p is 0, 1, or 2;
[2572] n is 0, 1, or 2;
[2573] n1 is 1 or 2, wherein n+n1≤3; and
[2574] q is 0, 1, 2, 3, or 4.

[2575] In some embodiments, the compound has a Formula (I):

[chemical structure]

[2576] or a pharmaceutically acceptable salt, hydrate, solvate, prodrug, stereoisomer, or tautomer thereof,
[2577] wherein:
[2578] X₁ is CR₃; [symbol]
[2579] [symbol] is optionally a double bond when X₁ is CR₃ and R₃ is absent;
[2580] each R₁ is independently (C₁-C₆)alkyl, (C₁-C₆)haloalkyl, (C₁-C₆)hydroxyalkyl, or halogen;
[2581] R₂ is (C₁-C₆)alkyl, (C₆-C₁₀)aryl, 5- or 6-membered heteroaryl comprising 1 to 3 heteroatoms selected from O, N, and S, (C₃-C₈)cycloalkyl, or 5- to 7-membered heterocycloalkyl comprising 1 to 3 heteroatoms selected from O, N, and S, wherein the alkyl is optionally substituted with one or more R₄; and the aryl, heteroaryl, cycloalkyl, and heterocycloalkyl are optionally substituted with one or more R₅; [symbol]
[2582] R₃ is H or R₃ is absent when [symbol] is a double bond;
[2583] each R₄ is independently selected from —C(O)OR₆, —C(O)NR₆R₆, —NR₆C(O)R₆, (C₆-C₁₀)aryl, 5- or 6-membered heteroaryl comprising 1 to 3 heteroatoms selected from O, N, and S, (C₃-C₈)cycloalkyl, and 5- to 7-membered heterocycloalkyl comprising 1 to 3 heteroatoms selected from O, N, and S, wherein the aryl, heteroaryl, cycloalkyl, and heterocycloalkyl groups are optionally substituted with one or more R₇;
[2584] each R₅ is independently selected from (C₁-C₆)alkyl, (C₂-C₆)alkenyl, (C₂-C₆)alkynyl, (C₁-C₆)alkoxy, (C₁-C₆)haloalkyl, (C₁-C₆)haloalkoxy, (C₁-C₆)hydroxyalkyl, halogen, —OH, —NH₂, CN, (C₃-C₇)cycloalkyl, 5- to 7-membered heterocycloalkyl comprising 1 to 3 heteroatoms selected from O, N, and S, (C₆-C₁₀)aryl, and 5- or 6-membered heteroaryl comprising 1 to 3 heteroatoms selected from O, N, and S, or
[2585] two R₅, when on adjacent atoms, together with the atoms to which they are attached form a (C₆-C₁₀)aryl ring or a 5- or 6-membered heteroaryl ring comprising 1 to 3 heteroatoms selected from O, N, and S, optionally substituted with one or more R₁₀, or
[2586] two R₅, when on adjacent atoms, together with the atoms to which they are attached form a (C₅-C₇)cycloalkyl ring or a 5- to 7-membered heterocycloalkyl ring comprising 1 to 3 heteroatoms selected from O, N, and S optionally substituted with one or more R₁₀;
[2587] R₆ and R₆ are each independently H or (C₁-C₆)alkyl;
[2588] each R₇ is independently selected from (C₁-C₆)alkyl, (C₂-C₆)alkenyl, (C₂-C₆)alkynyl, (C₁-C₆)alkoxy, (C₁-C₆)haloalkyl, (C₁-C₆)haloalkoxy, —C(O)R₈, —C(O)OR₈, —C(O)NR₈R₉, —NR₈C(O)R₉, (C₁-C₆)hydroxyalkyl, halogen, —OH, —NH₂, CN, (C₆-C₁₀)aryl, 5- or 6-membered heteroaryl comprising 1 to 3 heteroatoms selected from O, N, and S, (C₃-C₇)cycloalkyl, and 5- to 7-membered heterocycloalkyl comprising 1 to 3 heteroatoms selected from O, N, and S, or
[2589] two R₇, when on adjacent atoms, together with the atoms to which they are attached form a (C₆-C₁₀)aryl ring or a 5- or 6-membered heteroaryl ring comprising 1 to 3 heteroatoms selected from O, N, and S, optionally substituted with one or more R₁₀, or
[2590] two R₇, when on adjacent atoms, together with the atoms to which they are attached form a (C₅-C₇)cycloalkyl ring or a 5- to 7-membered heterocycloalkyl ring comprising 1 to 3 heteroatoms selected from O, N, and S, optionally substituted with one or more R₁₀;
[2591] R₈ and R₉ are each independently H or (C₁-C₆)alkyl;
[2592] each R₁₀ is independently selected from (C₁-C₆)alkyl, (C₁-C₆)alkoxy, (C₁-C₆)haloalkyl, (C₁-C₆)haloalkoxy, (C₁-C₆)hydroxyalkyl, halogen, —OH, —NH₂, and CN;
[2593] Rₓ is H or D;
[2594] n is 1 or 2; and
[2595] q is 0, 1, 2, 3, or 4.

[2596] In some embodiments, n is 1. In some embodiments, n is 2. In some embodiments, q is 0, 1, or 2. In some embodiments, X₁ is CH. In some embodiments, RX is H.

[2597] In some embodiments, R₂ is (C₆-C₁₀)aryl, (C₃-C₈)cycloalkyl, or 5- to 7-membered heterocycloalkyl comprising 1 to 3 heteroatoms selected from O, N, and S, wherein the aryl, heteroaryl, cycloalkyl, and heterocycloalkyl are optionally substituted with one to three R₅. In some embodiments, R₂ is (C₆-C₁₀)aryl, (C₃-C₈)cycloalkyl, or 5- to 7-membered heterocycloalkyl comprising 1 to 3 heteroatoms selected from O, N, and S. In some embodiments, R₂ is (C₁-C₆)alkyl optionally substituted with one to three R₄.

[2598] In some embodiments, the compound has a Formula (Ia), Formula (Ib), Formula (Ic), or Formula (Id):

[chemical structure]

[2599] In some embodiments, R₂ is (C₆-C₁₀)aryl, (C₃-C₈)cycloalkyl, or 5- to 7-membered heterocycloalkyl comprising 1 to 3 heteroatoms selected from O, N, and S, wherein the aryl, heteroaryl, cycloalkyl, and heterocycloalkyl are optionally substituted with one to three R₅. In some embodiments, R₂ is (C₆-C₁₀)aryl, (C₃-C₈)cycloalkyl, or 5- to 7-membered heterocycloalkyl comprising 1 to 3 heteroatoms selected from O, N, and S. In some embodiments, R₂ is (C₁-C₆)alkyl optionally substituted with one to three R₄.

[2600] In some embodiments, the compound is selected from:
[2601] 3-(5-(1-ethylpiperidin-4-yl)-1-oxoisoindolin-2-yl)piperidine-2,6-dione;
[2602] 3-(1-oxo-5-(1-propylpiperidin-4-yl)isoindolin-2-yl)piperidine-2,6-dione;
[2603] 3-(5-(1-(cyclopropylmethyl)piperidin-4-yl)-1-oxoisoindolin-2-yl)piperidine-2,6-dione;
[2604] 3-(5-(1-isobutylpiperidin-4-yl)-1-oxoisoindolin-2-yl)piperidine-2,6-dione;
[2605] 3-(5-(1-(cyclobutylmethyl)piperidin-4-yl)-1-oxoisoindolin-2-yl)piperidine-2,6-dione;
[2606] 3-(5-(1-(oxazol-2-ylmethyl)piperidin-4-yl)-1-oxoisoindolin-2-yl)piperidine-2,6-dione;
[2607] 3-(1-oxo-5-(1-(thiazol-2-ylmethyl)piperidin-4-yl)isoindolin-2-yl)piperidine-2,6-dione;
[2608] 3-(5-(1-(cyclopentylmethyl)piperidin-4-yl)-1-oxoisoindolin-2-yl)piperidine-2,6-dione;
[2609] 3-(5-(1-((5-chlorothiophen-2-yl)methyl)piperidin-4-yl)-1-oxoisoindolin-2-yl)piperidine-2,6-dione;
[2610] 3-(5-(1-((2-chlorothiazol-5-yl)methyl)piperidin-4-yl)-1-oxoisoindolin-2-yl)piperidine-2,6-dione;
[2611] 3-(5-(1-(cyclohexylmethyl)piperidin-4-yl)-1-oxoisoindolin-2-yl)piperidine-2,6-dione;
[2612] 3-(1-oxo-5-(1-(2-(pyrrolidin-1-yl)ethyl)piperidin-4-yl)isoindolin-2-yl)piperidine-2,6-dione;
[2613] 3-(1-oxo-5-(1-((tetrahydro-2H-pyran-4-yl)methyl)piperidin-4-yl)isoindolin-2-yl)piperidine-2,6-dione;
[2614] 3-(1-oxo-5-(1-phenethylpiperidin-4-yl)isoindolin-2-yl)piperidine-2,6-dione;
[2615] 3-(5-(1-(3-fluorobenzyl)piperidin-4-yl)-1-oxoisoindolin-2-yl)piperidine-2,6-dione;
[2616] 3-(5-(1-(3-chlorobenzyl)piperidin-4-yl)-1-oxoisoindolin-2-yl)piperidine-2,6-dione;
[2617] 3-(5-(1-(2-fluorobenzyl)piperidin-4-yl)-1-oxoisoindolin-2-yl)piperidine-2,6-dione;
[2618] 3-(5-(1-(2-chlorobenzyl)piperidin-4-yl)-1-oxoisoindolin-2-yl)piperidine-2,6-dione;
[2619] 3-(1-oxo-5-(1-(2-(piperidin-1-yl)ethyl)piperidin-4-yl)isoindolin-2-yl)piperidine-2,6-dione;
[2620] 3-(5-(1-((3,5-dimethylisoxazol-4-yl)methyl)piperidin-4-yl)-1-oxoisoindolin-2-yl)piperidine-2,6-dione;
[2621] 3-(5-(1-((1,3-dimethyl-1H-pyrazol-5-yl)methyl)piperidin-4-yl)-1-oxoisoindolin-2-yl)piperidine-2,6-dione;
[2622] 3-(5-(1-((6-methylpyridin-2-yl)methyl)piperidin-4-yl)-1-oxoisoindolin-2-yl)piperidine-2,6-dione;
[2623] 3-(5-(1-(3-morpholinopropyl)piperidin-4-yl)-1-oxoisoindolin-2-yl)piperidine-2,6-dione;
[2624] 3-(5-(1-(2,6-difluorobenzyl)piperidin-4-yl)-1-oxoisoindolin-2-yl)piperidine-2,6-dione;
[2625] 3-(5-(1-(2,6-dichlorobenzyl)piperidin-4-yl)-1-oxoisoindolin-2-yl)piperidine-2,6-dione;
[2626] 3-(5-(1-(3,5-difluorobenzyl)piperidin-4-yl)-1-oxoisoindolin-2-yl)piperidine-2,6-dione;
[2627] 3-(5-(1-(3,5-dibromobenzyl)piperidin-4-yl)-1-oxoisoindolin-2-yl)piperidine-2,6-dione;
[2628] 3-(5-(1-(3-chloro-5-fluorobenzyl)piperidin-4-yl)-1-oxoisoindolin-2-yl)piperidine-2,6-dione;
[2629] 3-(5-(1-(2,5-difluorobenzyl)piperidin-4-yl)-1-oxoisoindolin-2-yl)piperidine-2,6-dione;
[2630] 3-(5-(1-(2,5-dichlorobenzyl)piperidin-4-yl)-1-oxoisoindolin-2-yl)piperidine-2,6-dione;
[2631] 4-((4-(2-(2,6-dioxopiperidin-3-yl)-1-oxoisoindolin-5-yl)piperidin-1-yl)methyl)benzonitrile;
[2632] 3-(5-(1-(4-(hydroxymethyl)benzyl)piperidin-4-yl)-1-oxoisoindolin-2-yl)piperidine-2,6-dione;
[2633] 3-(5-(1-(3,4-dichlorobenzyl)piperidin-4-yl)-1-oxoisoindolin-2-yl)piperidine-2,6-dione;
[2634] 3-(5-(1-(4-chloro-2-fluorobenzyl)piperidin-4-yl)-1-oxoisoindolin-2-yl)piperidine-2,6-dione;
[2635] 3-(5-(1-(2-chloro-4-fluorobenzyl)piperidin-4-yl)-1-oxoisoindolin-2-yl)piperidine-2,6-dione;
[2636] 3-((4-(2-(2,6-dioxopiperidin-3-yl)-1-oxoisoindolin-5-yl)piperidin-1-yl)methyl)benzonitrile;
[2637] 3-(5-(1-(2,3-difluorobenzyl)piperidin-4-yl)-1-oxoisoindolin-2-yl)piperidine-2,6-dione;
[2638] 2-((4-(2-(2,6-dioxopiperidin-3-yl)-1-oxoisoindolin-5-yl)piperidin-1-yl)methyl)benzonitrile;
[2639] 3-(5-(1-(4-methoxybenzyl)piperidin-4-yl)-1-oxoisoindolin-2-yl)piperidine-2,6-dione;
[2640] 3-(5-(1-(2,5-dimethylbenzyl)piperidin-4-yl)-1-oxoisoindolin-2-yl)piperidine-2,6-dione;
[2641] 3-(5-(1-(3,4-dimethylbenzyl)piperidin-4-yl)-1-oxoisoindolin-2-yl)piperidine-2,6-dione;
[2642] 3-(5-(1-(2,4-dimethylbenzyl)piperidin-4-yl)-1-oxoisoindolin-2-yl)piperidine-2,6-dione;
[2643] 3-(5-(1-((1H-indazol-4-yl)methyl)piperidin-4-yl)-1-oxoisoindolin-2-yl)piperidine-2,6-dione;
[2644] 3-(5-(1-((1H-benzo[d]imidazol-2-yl)methyl)piperidin-4-yl)-1-oxoisoindolin-2-yl)piperidine-2,6-dione;
[2645] 3-(5-(1-(4-isopropylbenzyl)piperidin-4-yl)-1-oxoisoindolin-2-yl)piperidine-2,6-dione;
[2646] methyl 5-((4-(2-(2,6-dioxopiperidin-3-yl)-1-oxoisoindolin-5-yl)piperidin-1-yl)methyl)furan-2-carboxylate;
[2647] 3-(5-(1-(naphthalen-2-ylmethyl)piperidin-4-yl)-1-oxoisoindolin-2-yl)piperidine-2,6-dione;
[2648] 3-(1-oxo-5-(1-(quinolin-2-ylmethyl)piperidin-4-yl)isoindolin-2-yl)piperidine-2,6-dione;
[2649] 3-(5-(1-(naphthalen-1-ylmethyl)piperidin-4-yl)-1-oxoisoindolin-2-yl)piperidine-2,6-dione;
[2650] 3-(5-(1-((1-methyl-1H-benzo[d]imidazol-2-yl)methyl)piperidin-4-yl)-1-oxoisoindolin-2-yl)piperidine-2,6-dione;
[2651] 3-(1-oxo-5-(1-(4-(trifluoromethoxy)benzyl)piperidin-4-yl)isoindolin-2-yl)piperidine-2,6-dione;
[2652] 3-(5-(1-(4-(1H-pyrrol-1-yl)benzyl)piperidin-4-yl)-1-oxoisoindolin-2-yl)piperidine-2,6-dione;
[2653] 3-(5-(1-(4-(1H-1,2,4-triazol-1-yl)benzyl)piperidin-4-yl)-1-oxoisoindolin-2-yl)piperidine-2,6-dione;
[2654] 3-(1-oxo-5-(1-(3-(trifluoromethoxy)benzyl)piperidin-4-yl)isoindolin-2-yl)piperidine-2,6-dione;
[2655] 3-(1-oxo-5-(1-(2-(trifluoromethoxy)benzyl)piperidin-4-yl)isoindolin-2-yl)piperidine-2,6-dione;
[2656] 3-(5-(1-benzylpiperidin-4-yl)-1-oxoisoindolin-2-yl)piperidine-2,6-dione;
[2657] 3-(1-oxo-5-(1-(pyridin-2-ylmethyl)piperidin-4-yl)isoindolin-2-yl)piperidine-2,6-dione;
[2658] 3-(1-oxo-5-(1-(pyridin-3-ylmethyl)piperidin-4-yl)isoindolin-2-yl)piperidine-2,6-dione;
[2659] 3-(1-oxo-5-(1-(pyridin-4-ylmethyl)piperidin-4-yl)isoindolin-2-yl)piperidine-2,6-dione;
[2660] 3-(1-oxo-5-(1-(pyrimidin-5-ylmethyl)piperidin-4-yl)isoindolin-2-yl)piperidine-2,6-dione;
[2661] 3-(1-oxo-5-(1-(1-phenylethyl)piperidin-4-yl)isoindolin-2-yl)piperidine-2,6-dione;
[2662] 3-(5-(1-(4-(fluoromethyl)benzyl)piperidin-4-yl)-1-oxoisoindolin-2-yl)piperidine-2,6-dione;
[2663] 3-(5-(1-(3,4-difluorobenzyl)piperidin-4-yl)-1-oxoisoindolin-2-yl)piperidine-2,6-dione;
[2664] 2-((4-(2-(2,6-dioxopiperidin-3-yl)-1-oxoisoindolin-5-yl)piperidin-1-yl)methyl)pyrimidine-5-carbonitrile;
[2665] 3-(5-(1-(4-ethylbenzyl)piperidin-4-yl)-1-oxoisoindolin-2-yl)piperidine-2,6-dione;
[2666] 3-(5-(1-(2-methoxybenzyl)piperidin-4-yl)-1-oxoisoindolin-2-yl)piperidine-2,6-dione;
[2667] 3-(5-(1-((2-methoxypyrimidin-5-yl)methyl)piperidin-4-yl)-1-oxoisoindolin-2-yl)piperidine-2,6-dione;
[2668] 3-(5-(1-(3-fluoro-4-methylbenzyl)piperidin-4-yl)-1-oxoisoindolin-2-yl)piperidine-2,6-dione;
[2669] 3-(5-(1-(4-(difluoromethyl)benzyl)piperidin-4-yl)-1-oxoisoindolin-2-yl)piperidine-2,6-dione;
[2670] 4-((4-(2-(2,6-dioxopiperidin-3-yl)-1-oxoisoindolin-5-yl)piperidin-1-yl)methyl)benzamide;
[2671] 4-((4-(2-(2,6-dioxopiperidin-3-yl)-1-oxoisoindolin-5-yl)piperidin-1-yl)methyl)benzoic acid;
[2672] 3-(5-(1-(3-(difluoromethyl)benzyl)piperidin-4-yl)-1-oxoisoindolin-2-yl)piperidine-2,6-dione;
[2673] 3-((4-(2-(2,6-dioxopiperidin-3-yl)-1-oxoisoindolin-5-yl)piperidin-1-yl)methyl)benzoic acid;
[2674] 3-(1-oxo-5-(1-(4-propylbenzyl)piperidin-4-yl)isoindolin-2-yl)piperidine-2,6-dione;
[2675] 3-(1-oxo-5-(1-(4-(trifluoromethyl)benzyl)piperidin-4-yl)isoindolin-2-yl)piperidine-2,6-dione;
[2676] 3-(5-(1-(4-(difluoromethoxy)benzyl)piperidin-4-yl)-1-oxoisoindolin-2-yl)piperidine-2,6-dione;
[2677] 3-(1-oxo-5-(1-((5-(trifluoromethyl)pyridin-2-yl)methyl)piperidin-4-yl)isoindolin-2-yl)piperidine-2,6-dione;
[2678] 3-(5-(1-(3-(difluoromethoxy)benzyl)piperidin-4-yl)-1-oxoisoindolin-2-yl)piperidine-2,6-dione;
[2679] 3-(5-(1-(2-(difluoromethoxy)benzyl)piperidin-4-yl)-1-oxoisoindolin-2-yl)piperidine-2,6-dione;
[2680] 3-(5-(1-(4-cyclobutylbenzyl)piperidin-4-yl)-1-oxoisoindolin-2-yl)piperidine-2,6-dione;
[2681] 3-(5-(1-((2,3-dihydrobenzo[b][1,4]dioxin-5-yl)methyl)piperidin-4-yl)-1-oxoisoindolin-2-yl)piperidine-2,6-dione;
[2682] 3-(5-(1-((2,3-dihydrobenzo[b][1,4]dioxin-6-yl)methyl)piperidin-4-yl)-1-oxoisoindolin-2-yl)piperidine-2,6-dione;
[2683] 3-(5-(1-(4-(tert-butyl)benzyl)piperidin-4-yl)-1-oxoisoindolin-2-yl)piperidine-2,6-dione;
[2684] 3-(5-(1-(4-isobutylbenzyl)piperidin-4-yl)-1-oxoisoindolin-2-yl)piperidine-2,6-dione; N-(4-((4-(2-(2,6-dioxopiperidin-3-yl)-1-oxoisoindolin-5-yl)piperidin-1-yl)methyl)phenyl)acetamide;
[2685] 3-(5-(1-((2,2-difluorobenzo[d][1,3]dioxol-5-yl)methyl)piperidin-4-yl)-1-oxoisoindolin-2-yl)piperidine-2,6-dione;
[2686] 3-(5-(1-((3,4-dihydro-2H-benzo[b][1,4]dioxepin-7-yl)methyl)piperidin-4-yl)-1-oxoisoindolin-2-yl)piperidine-2,6-dione;
[2687] 3-(1-oxo-5-(1-(4-(tert-pentyl)benzyl)piperidin-4-yl)isoindolin-2-yl)piperidine-2,6-dione;
[2688] 3-(5-(1-([1,1′-biphenyl]-4-ylmethyl)piperidin-4-yl)-1-oxoisoindolin-2-yl)piperidine-2,6-dione;
[2689] 3-(5-(1-(4-(1H-pyrazol-1-yl)benzyl)piperidin-4-yl)-1-oxoisoindolin-2-yl)piperidine-2,6-dione;
[2690] 3-(5-(1-(4-(1H-imidazol-1-yl)benzyl)piperidin-4-yl)-1-oxoisoindolin-2-yl)piperidine-2,6-dione;
[2691] 3-(5-(1-(3-(1H-pyrazol-1-yl)benzyl)piperidin-4-yl)-1-oxoisoindolin-2-yl)piperidine-2,6-dione;
[2692] 3-(5-(1-(4-cyclohexylbenzyl)piperidin-4-yl)-1-oxoisoindolin-2-yl)piperidine-2,6-dione;
[2693] 3-(1-oxo-5-(1-(pyrimidin-2-ylmethyl)piperidin-4-yl)isoindolin-2-yl)piperidine-2,6-dione;
[2694] 3-(5-(1-(4-bromobenzyl)piperidin-4-yl)-1-oxoisoindolin-2-yl)piperidine-2,6-dione;
[2695] 3-(5-(1-(4-chlorobenzyl)piperidin-4-yl)-1-oxoisoindolin-2-yl)piperidine-2,6-dione;
[2696] 3-(5-(1-(3,5-dichlorobenzyl)piperidin-4-yl)-1-oxoisoindolin-2-yl)piperidine-2,6-dione
[2697] 3-(5-(1-(4-chloro-3-fluorobenzyl)piperidin-4-yl)-1-oxoisoindolin-2-yl)piperidine-2,6-dione;
[2698] 3-(5-(1-(3-chloro-4-fluorobenzyl)piperidin-4-yl)-1-oxoisoindolin-2-yl)piperidine-2,6-dione;
[2699] 3-(5-(1-(2,4-difluorobenzyl)piperidin-4-yl)-1-oxoisoindolin-2-yl)piperidine-2,6-dione;
[2700] 3-(5-(1-(3-methoxybenzyl)piperidin-4-yl)-1-oxoisoindolin-2-yl)piperidine-2,6-dione;
[2701] 3-(5-(1-(benzo[c][1,2,5]oxadiazol-5-ylmethyl)piperidin-4-yl)-1-oxoisoindolin-2-yl)piperidine-2,6-dione;
[2702] 3-(5-(1-(2-cyclopropylbenzyl)piperidin-4-yl)-1-oxoisoindolin-2-yl)piperidine-2,6-dione;
[2703] 3-(5-(1-((1,3-dihydroisobenzofuran-5-yl)methyl)piperidin-4-yl)-1-oxoisoindolin-2-yl)piperidine-2,6-dione;
[2704] 3-(1-oxo-5-(1-(2-(trifluoromethyl)benzyl)piperidin-4-yl)isoindolin-2-yl)piperidine-2,6-dione;
[2705] 3-(5-(1-(3-isopropoxybenzyl)piperidin-4-yl)-1-oxoisoindolin-2-yl)piperidine-2,6-dione;
[2706] 3-(1-oxo-5-(1-(4-(thiophen-3-yl)benzyl)piperidin-4-yl)isoindolin-2-yl)piperidine-2,6-dione;
[2707] 3-(5-(1-(4-cyclopentylbenzyl)piperidin-4-yl)-1-oxoisoindolin-2-yl)piperidine-2,6-dione;
[2708] 3-(1-oxo-5-(1-(4-(pyrrolidin-1-yl)benzyl)piperidin-4-yl)isoindolin-2-yl)piperidine-2,6-dione;
[2709] 3-(5-(1-(4-fluorobenzyl)piperidin-4-yl)-1-oxoisoindolin-2-yl)piperidine-2,6-dione;
[2710] 3-(5-(1-(2,4-dichlorobenzyl)piperidin-4-yl)-1-oxoisoindolin-2-yl)piperidine-2,6-dione;
[2711] 3-(1-oxo-5-(1-(quinolin-8-ylmethyl)piperidin-4-yl)isoindolin-2-yl)piperidine-2,6-dione;
[2712] 3-(5-(1-((1-methyl-1H-pyrazol-4-yl)methyl)piperidin-4-yl)-1-oxoisoindolin-2-yl)piperidine-2,6-dione;
[2713] 3-(5-(1-((1H-pyrazol-4-yl)methyl)piperidin-4-yl)-1-oxoisoindolin-2-yl)piperidine-2,6-dione;
[2714] 3-(5-(1-((1-methyl-1H-pyrazol-3-yl)methyl)piperidin-4-yl)-1-oxoisoindolin-2-yl)piperidine-2,6-dione;
[2715] 3-(5-(1-((1H-pyrazol-3-yl)methyl)piperidin-4-yl)-1-oxoisoindolin-2-yl)piperidine-2,6-dione;
[2716] 3-(5-(1-((1H-pyrrol-3-yl)methyl)piperidin-4-yl)-1-oxoisoindolin-2-yl)piperidine-2,6-dione;
[2717] 3-(5-(1-((1H-imidazol-5-yl)methyl)piperidin-4-yl)-1-oxoisoindolin-2-yl)piperidine-2,6-dione;
[2718] 3-(5-(1-((1-ethyl-1H-pyrazol-3-yl)methyl)piperidin-4-yl)-1-oxoisoindolin-2-yl)piperidine-2,6-dione;
[2719] 3-(5-(1-((2-aminopyrimidin-5-yl)methyl)piperidin-4-yl)-1-oxoisoindolin-2-yl)piperidine-2,6-dione;
[2720] 3-(5-(1-((6-aminopyridin-3-yl)methyl)piperidin-4-yl)-1-oxoisoindolin-2-yl)piperidine-2,6-dione;
[2721] 3-(5-(1-((5-amino-1-methyl-1H-pyrazol-4-yl)methyl)piperidin-4-yl)-1-oxoisoindolin-2-yl)piperidine-2,6-dione;
[2722] 3-(5-(1-((6-methylimidazo[2,1-b]thiazol-5-yl)methyl)piperidin-4-yl)-1-oxoisoindolin-2-yl)piperidine-2,6-dione;
[2723] 3-(5-(1-(imidazo[1,2-a]pyrazin-3-ylmethyl)piperidin-4-yl)-1-oxoisoindolin-2-yl)piperidine-2,6-dione;
[2724] 3-(5-(1-([1,2,4]triazolo[1,5-a]pyridin-5-ylmethyl)piperidin-4-yl)-1-oxoisoindolin-2-yl)piperidine-2,6-dione;
[2725] 3-(1-oxo-5-(1-(pyrazolo[1,5-a]pyridin-4-ylmethyl)piperidin-4-yl)isoindolin-2-yl)piperidine-2,6-dione;
[2726] 3-(5-(1-((1,4-dimethyl-1H-imidazol-2-yl)methyl)piperidin-4-yl)-1-oxoisoindolin-2-yl)piperidine-2,6-dione;
[2727] 3-(5-(1-(benzo[d]thiazol-5-ylmethyl)piperidin-4-yl)-1-oxoisoindolin-2-yl)piperidine-2,6-dione;
[2728] 3-(1-oxo-5-(1-(pyrazolo[1,5-a]pyrimidin-6-ylmethyl)piperidin-4-yl)isoindolin-2-yl)piperidine-2,6-dione;
[2729] 3-(5-(1-(imidazo[1,2-a]pyrimidin-3-ylmethyl)piperidin-4-yl)-1-oxoisoindolin-2-yl)piperidine-2,6-dione;
[2730] 3-(5-(1-(imidazo[1,2-a]pyrimidin-2-ylmethyl)piperidin-4-yl)-1-oxoisoindolin-2-yl)piperidine-2,6-dione;
[2731] 3-(5-(1-((1-cyclobutyl-1H-1,2,3-triazol-4-yl)methyl)piperidin-4-yl)-1-oxoisoindolin-2-yl)piperidine-2,6-dione;
[2732] 3-(1-oxo-5-(1-((4,5,6,7-tetrahydropyrazolo[1,5-a]pyridin-2-yl)methyl)piperidin-4-yl)isoindolin-2-yl)piperidine-2,6-dione;
[2733] 3-(5-(1-((1H-indol-2-yl)methyl)piperidin-4-yl)-1-oxoisoindolin-2-yl)piperidine-2,6-dione;
[2734] 3-(5-(1-((1H-indazol-6-yl)methyl)piperidin-4-yl)-1-oxoisoindolin-2-yl)piperidine-2,6-dione;
[2735] 3-(5-(1-((1H-pyrrolo[2,3-b]pyridin-3-yl)methyl)piperidin-4-yl)-1-oxoisoindolin-2-yl)piperidine-2,6-dione; 3-((4-(2-(2,6-dioxopiperidin-3-yl)-1-oxoisoindolin-5-yl)piperidin-1-yl)methyl)benzamide;
[2736] 3-(5-(1-((1H-pyrrolo[2,3-b]pyridin-6-yl)methyl)piperidin-4-yl)-1-oxoisoindolin-2-yl)piperidine-2,6-dione;
[2737] 3-(5-(1-((3,4-dihydro-2H-benzo[b][1,4]thiazin-6-yl)methyl)piperidin-4-yl)-1-oxoisoindolin-2-yl)piperidine-2,6-dione;
[2738] 3-(1-oxo-5-(1-((2-(pyrrolidin-1-yl)pyrimidin-5-yl)methyl)piperidin-4-yl)isoindolin-2-yl)piperidine-2,6-dione;
[2739] 3-(5-(1-((2-(tert-butyl)thiazol-4-yl)methyl)piperidin-4-yl)-1-oxoisoindolin-2-yl)piperidine-2,6-dione;
[2740] 3-(1-oxo-5-(1-((2-(thiophen-2-yl)thiazol-5-yl)methyl)piperidin-4-yl)isoindolin-2-yl)piperidine-2,6-dione;
[2741] 3-(5-(1-((5-cyclopropyl-1H-pyrazol-3-yl)methyl)piperidin-4-yl)-1-oxoisoindolin-2-yl)piperidine-2,6-dione;
[2742] 3-(5-(1-((2-morpholinopyrimidin-5-yl)methyl)piperidin-4-yl)-1-oxoisoindolin-2--yl)piperidine-2,6-dione; 3-(1-oxo-5-(1-((3-phenyl-1H-pyrazol-4-yl)methyl)piperidin-4-yl)isoindolin-2-yl)piperidine-2,6-dione;
[2743] 3-(5-(1-((6-methyl-1H-indol-3-yl)methyl)piperidin-4-yl)-1-oxoisoindolin-2-yl)piperidine-2,6-dione;
[2744] methyl 4-((4-(2-(2,6-dioxopiperidin-3-yl)-1-oxoisoindolin-5-yl)piperidin-1-yl)methyl)-1H-pyrrole-2-carboxylate;
[2745] 3-(1-oxo-5-(1-((3-(pyridin-3-yl)-1H-pyrazol-4-yl)methyl)piperidin-4-yl)isoindolin-2-yl)piperidine-2,6-dione;
[2746] 3-(1-oxo-5-(1-((5-(pyridin-2-yl)-1H-pyrazol-3-yl)methyl)piperidin-4-yl)isoindolin-2-yl)piperidine-2,6-dione;
[2747] 3-(5-(1-(3,5-difluoro-4-hydroxybenzyl)piperidin-4-yl)-1-oxoisoindolin-2-yl)piperidine-2,6-dione;
[2748] 3-(5-(1-(2-methylbenzyl)piperidin-4-yl)-1-oxoisoindolin-2-yl)piperidine-2,6-dione;
[2749] 3-(5-(1-(4-methylbenzyl)piperidin-4-yl)-1-oxoisoindolin-2-yl)piperidine-2,6-dione;
[2750] 3-(5-(1-(3,5-dimethylbenzyl)piperidin-4-yl)-1-oxoisoindolin-2-yl)piperidine-2,6-dione;
[2751] 3-(5-((2S)-1-benzyl-2-methylpiperidin-4-yl)-1-oxoisoindolin-2-yl)piperidine-2,6-dione;
[2752] 3-(5-((2R)-1-benzyl-2-methylpiperidin-4-yl)-1-oxoisoindolin-2-yl)piperidine-2,6-dione;
[2753] 3-(5-(1-benzyl-2-methylpiperidin-4-yl)-1-oxoisoindolin-2-yl)piperidine-2,6-dione;
[2754] 3-(5-(1-methyl-1,2,3,6-tetrahydropyridin-4-yl)-1-oxoisoindolin-2-yl)piperidine-2,6-dione;
[2755] 3-(1-oxo-5-(1-((5,6,7,8-tetrahydronaphthalen-1-yl)methyl)piperidin-4-yl)isoindolin-2-yl)piperidine-2,6-dione;
[2756] 3-(5-(azepan-4-yl)-1-oxoisoindolin-2-yl)piperidine-2,6-dione;
[2757] 3-(5-((R)-azepan-4-yl)-1-oxoisoindolin-2-yl)piperidine-2,6-dione;
[2758] 3-(5-((S)-azepan-4-yl)-1-oxoisoindolin-2-yl)piperidine-2,6-dione;
[2759] 3-(1-oxo-5-(1-((1,2,3,4-tetrahydronaphthalen-1-yl)methyl)piperidin-4-yl)isoindolin-2-yl)piperidine-2,6-dione;
[2760] methyl 2-(4-(2-(2,6-dioxopiperidin-3-yl)-1-oxoisoindolin-5-yl)piperidin-1-yl)acetate;
[2761] 3-(1-oxo-5-(1-phenylpiperidin-4-yl)isoindolin-2-yl)piperidine-2,6-dione;
[2762] 3-(5-(1-(3-methylbenzyl)piperidin-4-yl)-1-oxoisoindolin-2-yl)piperidine-2,6-dione;
[2763] 3-(5-(1-(2,6-dimethylbenzyl)piperidin-4-yl)-1-oxoisoindolin-2-yl)piperidine-2,6-dione;
[2764] 3-(1-oxo-5-(1-((5,6,7,8-tetrahydronaphthalen-2-yl)methyl)piperidin-4-yl)isoindolin-2-yl)piperidine-2,6-dione;
[2765] ethyl 2-(4-(2-(2,6-dioxopiperidin-3-yl)-1-oxoisoindolin-5-yl)piperidin-1-yl)acetate;
[2766] tert-butyl 2-(4-(2-(2,6-dioxopiperidin-3-yl)-1-oxoisoindolin-5-yl)piperidin-1-yl)acetate;
[2767] 2-(4-(2-(2,6-dioxopiperidin-3-yl)-1-oxoisoindolin-5-yl)piperidin-1-yl)acetic acid;
[2768] 3-(1-oxo-5-(1-(3,3,3-trifluoropropyl)piperidin-4-yl)isoindolin-2-yl)piperidine-2,6-dione;
[2769] 2-(4-(2-(2,6-dioxopiperidin-3-yl)-1-oxoisoindolin-5-yl)piperidin-1-yl)-N-phenylacetamide;
[2770] 3-(5-(1-(3-fluoropropyl)piperidin-4-yl)-1-oxoisoindolin-2-yl)piperidine-2,6-dione;
[2771] tert-butyl 4-((4-(2-(2,6-dioxopiperidin-3-yl)-1-oxoisoindolin-5-yl)piperidin-1-yl)methyl)benzoate;
[2772] 3-(5-(1-benzyl-3,3-dimethylpiperidin-4-yl)-1-oxoisoindolin-2-yl)piperidine-2,6-dione;
[2773] 3-(5-(1-benzyl-3-methylpiperidin-4-yl)-1-oxoisoindolin-2-yl)piperidine-2,6-dione;
[2774] 3-(5-(1-(2-hydroxy-1-phenylethyl)piperidin-4-yl)-1-oxoisoindolin-2-yl)piperidine-2,6-dione;
[2775] 3-(5-((S)-1-benzylazepan-4-yl)-1-oxoisoindolin-2-yl)piperidine-2,6-dione;
[2776] 3-(5-(1-benzyl-2,5-dihydro-1H-pyrrol-3-yl)-1-oxoisoindolin-2-yl)piperidine-2,6-dione;
[2777] 3-(5-(1-benzyl-2-oxopiperidin-4-yl)-1-oxoisoindolin-2-yl)piperidine-2,6-dione;
[2778] 3-(5-(1-benzyl-1,2,3,4-tetrahydroquinolin-4-yl)-1-oxoisoindolin-2-yl)piperidine-2,6-dione;
[2779] 3-(5-(1-((1-benzyl-1H-tetrazol-5-yl)methyl)piperidin-4-yl)-1-oxoisoindolin-2-yl)piperidine-2,6-dione;
[2780] 3-(1-oxo-5-(1-((5-phenyl-1,3,4-oxadiazol-2-yl)methyl)piperidin-4-yl)isoindolin-2-yl)piperidine-2,6-dione;
[2781] 3-(5-(1-(benzo[d]thiazol-2-ylmethyl)piperidin-4-yl)-1-oxoisoindolin-2-yl)piperidine-2,6-dione;
[2782] 3-(1-oxo-5-(1-((3-(pyridin-2-yl)-1H-pyrazol-5-yl)methyl)piperidin-4-yl)isoindolin-2-yl)piperidine-2,6-dione;
[2783] 3-(5-(1-((R)-2-hydroxy-1-phenylethyl)piperidin-4-yl)-1-oxoisoindolin-2-yl)piperidine-2,6-dione;
[2784] 3-(5-(1-((1-methyl-1H-indazol-3-yl)methyl)piperidin-4-yl)-1-oxoisoindolin-2-yl)piperidine-2,6-dione;
[2785] 3-(5-(1-((1,2,4-oxadiazol-3-yl)methyl)piperidin-4-yl)-1-oxoisoindolin-2-yl)piperidine-2,6-dione;
[2786] 3-(5-(1-(4-hydroxy-3-((4-methylpiperazin-1-yl)methyl)benzyl)piperidin-4-yl)-1-oxoisoindolin-2-yl)piperidine-2,6-dione;
[2787] 2-(4-((4-(2-(2,6-dioxopiperidin-3-yl)-1-oxoisoindolin-5-yl)piperidin-1-yl)methyl)phenyl)acetonitrile;
[2788] 3-(5-(1-((7-hydroxy-2-methylpyrazolo[1,5-a]pyrimidin-5-yl)methyl)piperidin-4-yl)-1-oxoisoindolin-2-yl)piperidine-2,6-dione;
[2789] 3-(5-(1-(2,2-difluoro-1-phenylethyl)piperidin-4-yl)-1-oxoisoindolin-2-yl)piperidine-2,6-dione;
[2790] 3-(5-(1-((3-fluorobicyclo[1.1.1]pentan-1-yl)methyl)piperidin-4-yl)-1-oxoisoindolin-2-yl)piperidine-2,6-dione;
[2791] 3-(5-(1-(2-fluoro-1-phenylethyl)piperidin-4-yl)-1-oxoisoindolin-2-yl)piperidine-2,6-dione;
[2792] 3-(1-oxo-5-(1-((4-oxo-3,4-dihydrothieno[3,2-d]pyrimidin-2-yl)methyl)piperidin-4-yl)isoindolin-2-yl)piperidine-2,6-dione;
[2793] 3-(1-oxo-5-(1-(quinolin-4-ylmethyl)piperidin-4-yl)isoindolin-2-yl)piperidine-2,6-dione;
[2794] 3-(5-(1-(3,5-bis(trifluoromethyl)benzyl)piperidin-4-yl)-1-oxoisoindolin-2-yl)piperidine-2,6-dione; 6-((4-(2-(2,6-dioxopiperidin-3-yl)-1-oxoisoindolin-5-yl)piperidin-1-yl)methyl)picolinonitrile;
[2795] 2-(4-((4-(2-(2,6-dioxopiperidin-3-yl)-1-oxoisoindolin-5-yl)piperidin-1-yl)methyl)phenoxy)acetonitrile;
[2796] 3-(5-(1-((1H-indazol-5-yl)methyl)piperidin-4-yl)-1-oxoisoindolin-2-yl)piperidine-2,6-dione;
[2797] 3-(5-(1-(2,2-difluoroethyl)piperidin-4-yl)-1-oxoisoindolin-2-yl)piperidine-2,6-dione;
[2798] 3-(5-(1-((7-methyl-4-oxo-4H-pyrido[1,2-a]pyrimidin-2-yl)methyl)piperidin-4-yl)-1-oxoisoindolin-2-yl)piperidine-2,6-dione;
[2799] benzyl 4-(2-(2,6-dioxopiperidin-3-yl)-1-oxoisoindolin-5-yl)piperidine-1-carboxylate;
[2800] 3-(1-oxo-5-(1-(2-phenylacetyl)piperidin-4-yl)isoindolin-2-yl)piperidine-2,6-dione;
[2801] 3-(1-oxo-5-(1-(2,2,2-trifluoro-1-phenylethyl)piperidin-4-yl)isoindolin-2-yl)piperidine-2,6-dione;
[2802] 3-(5-(1-(4-(5-methylbenzo[d]thiazol-2-yl)benzyl)piperidin-4-yl)-1-oxoisoindolin-2-yl)piperidine-2,6-dione;
[2803] 3-(5-(1-(isoquinolin-1-ylmethyl)piperidin-4-yl)-1-oxoisoindolin-2-yl)piperidine-2,6-dione;
[2804] 3-(5-(1-(4-(4-methoxypiperidin-1-yl)benzyl)piperidin-4-yl)-1-oxoisoindolin-2-yl)piperidine-2,6-dione;
[2805] 3-(5-(1-(4-(isopropylthio)benzyl)piperidin-4-yl)-1-oxoisoindolin-2-yl)piperidine-2,6-dione;
[2806] 3-(1-oxo-5-(1-((S)-1-phenylethyl)piperidin-4-yl)isoindolin-2-yl)piperidine-2,6-dione;
[2807] 2-(4-((4-(2-(2,6-dioxopiperidin-3-yl)-1-oxoisoindolin-5-yl)piperidin-1-yl)methyl)phenyl)acetic acid;
[2808] 3-(5-(1-((7-fluoroquinolin-2-yl)methyl)piperidin-4-yl)-1-oxoisoindolin-2-yl)piperidine-2,6-dione;
[2809] 3-(5-(1-((2-amino-4-(trifluoromethyl)thiazol-5-yl)methyl)piperidin-4-yl)-1-oxoisoindolin-2-yl)piperidine-2,6-dione;
[2810] 3-((4-(2-(2,6-dioxopiperidin-3-yl)-1-oxoisoindolin-5-yl)piperidin-1-yl)methyl)-1,2,4-oxadiazole-5-carboxamide;
[2811] 3-(5-(1-(3-(morpholinosulfonyl)benzyl)piperidin-4-yl)-1-oxoisoindolin-2-yl)piperidine-2,6-dione;
[2812] 4-((4-(2-(2,6-dioxopiperidin-3-yl)-1-oxoisoindolin-5-yl)piperidin-1-yl)methyl)-N,N-dimethylbenzenesulfonamide;
[2813] 3-(1-oxo-5-(1-(thiazol-4-ylmethyl)piperidin-4-yl)isoindolin-2-yl)piperidine-2,6-dione;
[2814] 3-(1-oxo-5-(1-(quinoxalin-6-ylmethyl)piperidin-4-yl)isoindolin-2-yl)piperidine-2,6-dione;
[2815] 3-(5-(1-(4-(tert-butyl)benzoyl)piperidin-4-yl)-1-oxoisoindolin-2-yl)piperidine-2,6-dione;
[2816] 3-(5-(1-(4-((4-fluorobenzyl)oxy)benzyl)piperidin-4-yl)-1-oxoisoindolin-2-yl)piperidine-2,6-dione;
[2817] 3-(5-(1-((3-methylisoxazol-5-yl)methyl)piperidin-4-yl)-1-oxoisoindolin-2-yl)piperidine-2,6-dione;
[2818] 3-(5-(1-(isoxazol-3-ylmethyl)piperidin-4-yl)-1-oxoisoindolin-2-yl)piperidine-2,6-dione;
[2819] 3-(1-oxo-5-(1-((R)-1-phenylethyl)piperidin-4-yl)isoindolin-2-yl)piperidine-2,6-dione;
[2820] 3-(5-(1-(4-(methoxymethyl)benzyl)piperidin-4-yl)-1-oxoisoindolin-2-yl)piperidine-2,6-dione;
[2821] 3-(5-(1-((S)-2-hydroxy-1-phenylethyl)piperidin-4-yl)-1-oxoisoindolin-2-yl)piperidine-2,6-dione;
[2822] 3-(1-oxo-5-(1-(phenylsulfonyl)piperidin-4-yl)isoindolin-2-yl)piperidine-2,6-dione;
[2823] 3-(5-(1-((5-methyl-3-phenylisoxazol-4-yl)methyl)piperidin-4-yl)-1-oxoisoindolin-2-yl)piperidine-2,6-dione;
[2824] 3-(5-(1-(4-((difluoromethyl)sulfonyl)benzyl)piperidin-4-yl)-1-oxoisoindolin-2-yl)piperidine-2,6-dione;
[2825] 3-(1-oxo-5-(1-(2,2,2-trifluoroethyl)piperidin-4-yl)isoindolin-2-yl)piperidine-2,6-dione;
[2826] methyl 2-((4-(2-(2,6-dioxopiperidin-3-yl)-1-oxoisoindolin-5-yl)piperidin-1-yl)methyl)oxazole-4-carboxylate;
[2827] 3-(1-oxo-5-(1-(4-(pyridin-2-ylmethoxy)benzyl)piperidin-4-yl)isoindolin-2-yl)piperidine-2,6-dione;
[2828] 3-(5-(1-acetylpiperidin-4-yl)-1-oxoisoindolin-2-yl)piperidine-2,6-dione;
[2829] 3-(1-oxo-5-(1-((2-oxo-2,3-dihydro-1H-benzo[d]imidazol-5-yl)methyl)piperidin-4-yl)isoindolin-2-yl)piperidine-2,6-dione;
[2830] 3-(5-(1-benzylpyrrolidin-3-yl)-1-oxoisoindolin-2-yl)piperidine-2,6-dione;
[2831] (R)-3-(5-((R)-1-benzylazepan-4-yl)-1-oxoisoindolin-2-yl)piperidine-2,6-dione;
[2832] (S)-3-(5-((S)-1-benzylazepan-4-yl)-1-oxoisoindolin-2-yl)piperidine-2,6-dione;
[2833] 3-(5-(1-benzylazepan-4-yl)-1-oxoisoindolin-2-yl)piperidine-2,6-dione;
[2834] 3-(5-(1-methyl-2,3,6,7-tetrahydro-1H-azepin-4-yl)-1-oxoisoindolin-2-yl)piperidine-2,6-dione;
[2835] 3-(5-(8-benzyl-8-azabicyclo[3.2.1]octan-3-yl)-1-oxoisoindolin-2-yl)piperidine-2,6-dione;
[2836] 3-(5-(8-azabicyclo[3.2.1]octan-3-yl)-1-oxoisoindolin-2-yl)piperidine-2,6-dione;
[2837] 3-(5-(1-acetyl-1,2,5,6-tetrahydropyridin-3-yl)-1-oxoisoindolin-2-yl)piperidine-2,6-dione;
[2838] (R)-3-(5-((R)-1-acetylpyrrolidin-3-yl)-1-oxoisoindolin-2-yl)piperidine-2,6-dione;
[2839] 3-(5-(1-acetyl-1,2,3,6-tetrahydropyridin-4-yl)-1-oxoisoindolin-2-yl)piperidine-2,6-dione;
[2840] 3-(5-(octahydroindolizin-7-yl)-1-oxoisoindolin-2-yl)piperidine-2,6-dione;
[2841] (R)-3-(5-((S)-1-benzylazepan-4-yl)-1-oxoisoindolin-2-yl)piperidine-2,6-dione;
[2842] 3-(5-((R)-1-benzylazepan-4-yl)-1-oxoisoindolin-2-yl)piperidine-2,6-dione;
[2843] 3-(5-(1-acetyl-2,5-dihydro-1H-pyrrol-3-yl)-1-oxoisoindolin-2-yl)piperidine-2,6-dione;
[2844] 3-(5-(1-methylazepan-4-yl)-1-oxoisoindolin-2-yl)piperidine-2,6-dione;
[2845] (S)-3-(5-((R)-1-benzylazepan-4-yl)-1-oxoisoindolin-2-yl)piperidine-2,6-dione;
[2846] (S)-3-(5-((R)-1-acetylpyrrolidin-3-yl)-1-oxoisoindolin-2-yl)piperidine-2,6-dione;
[2847] 3-(5-(1-((6-isopropoxypyridin-3-yl)methyl)piperidin-4-yl)-1-oxoisoindolin-2-yl)piperidine-2,6-dione;
[2848] 3-(1-oxo-5-(1-((1-phenyl-1H-pyrazol-5-yl)methyl)piperidin-4-yl)isoindolin-2-yl)piperidine-2,6-dione;
[2849] 3-(5-(1-(4-ethoxybenzyl)piperidin-4-yl)-1-oxoisoindolin-2-yl)piperidine-2,6-dione;
[2850] 3-(1-oxo-5-(1-((1-phenyl-1H-pyrazol-4-yl)methyl)piperidin-4-yl)isoindolin-2-yl)piperidine-2,6-dione;
[2851] 3-(5-(1-((1-isopropyl-1H-pyrazol-5-yl)methyl)piperidin-4-yl)-1-oxoisoindolin-2-yl)piperidine-2,6-dione;
[2852] 3-(5-(1-(isothiazol-5-ylmethyl)piperidin-4-yl)-1-oxoisoindolin-2-yl)piperidine-2,6-dione;
[2853] 3-(5-(1-((1-isopropyl-1H-pyrazol-4-yl)methyl)piperidin-4-yl)-1-oxoisoindolin-2-yl)piperidine-2,6-dione;
[2854] 3-(5-(1-((1H-pyrazol-5-yl)methyl)piperidin-4-yl)-1-oxoisoindolin-2-yl)piperidine-2,6-dione;
[2855] 3-(5-(1-((5-isopropoxypyridin-2-yl)methyl)piperidin-4-yl)-1-oxoisoindolin-2-yl)piperidine-2,6-dione;
[2856] 3-(1-oxo-5-(1-((1-(pyridin-3-yl)-1H-pyrazol-5-yl)methyl)piperidin-4-yl)isoindolin-2-yl)piperidine-2,6-dione;
[2857] 3-(1-oxo-5-(1-((1-(pyridin-3-yl)-1H-pyrazol-4-yl)methyl)piperidin-4-yl)isoindolin-2-yl)piperidine-2,6-dione;
[2858] 5-((4-(2-(2,6-dioxopiperidin-3-yl)-1-oxoisoindolin-5-yl)piperidin-1-yl)methyl)-2-fluorobenzonitrile;
[2859] 3-(5-(1-((5-fluoropyridin-2-yl)methyl)piperidin-4-yl)-1-oxoisoindolin-2-yl)piperidine-2,6-dione;
[2860] 3-(5-(1-((1-ethyl-3-(pyridin-3-yl)-1H-pyrazol-4-yl)methyl)piperidin-4-yl)-1-oxoisoindolin-2-yl)piperidine-2,6-dione;
[2861] trans-3-(1-oxo-5-(1-((4-(trifluoromethyl)cyclohexyl)methyl)piperidin-4-yl)isoindolin-2-yl)piperidine-2,6-dione;
[2862] cis-3-(1-oxo-5-(1-((4-(trifluoromethyl)cyclohexyl)methyl)piperidin-4-yl)isoindolin-2-yl)piperidine-2,6-dione;
[2863] trans-3-(5-(1-((4-methoxycyclohexyl)methyl)piperidin-4-yl)-1-oxoisoindolin-2-yl)piperidine-2,6-dione; and
[2864] 3-(5-(1-((6-methoxypyridin-2-yl)methyl)piperidin-4-yl)-1-oxoisoindolin-2-yl)piperidine-2,6-dione;
   [2865] or a pharmaceutically acceptable salt, hydrate, solvate, prodrug, stereoisomer, or tautomer thereof.

[2866] Additional exemplary IKZF2 inhibitors are also described in U.S. Pat. Nos. 10,414,755 and 10,640,489, U.S. Application Publication Nos. US2019/0367483 and US2019/0359594, and International Publication Nos. WO2020/012334 and WO2019/038717, which are incorporated by reference in their entirety.

[2867] In some embodiments, the ZBTB32 inhibitor and the IKZF2 inhibitor are used in combination to treat a non-small cell lung cancer (NSCLC), a melanoma, a triple-negative breast cancer (TNBC), nasopharyngeal cancer (NPC), a microsatellite stable colorectal cancer (mssCRC), a thymoma, a carcinoid, or gastrointestinal stromal tumor (GIST).

### EXAMPLES

[2868] The disclosure is further described in detail by reference to the following experimental examples. These examples are provided for purposes of illustration only, and are not intended to be limiting unless otherwise specified. Thus, the disclosure should in no way be construed as being limited to the following examples, but rather, should be construed to encompass any and all variations which become evident as a result of the teaching provided herein.

[2869] Without further description, it is believed that one of ordinary skill in the art can, using the preceding description and the following illustrative examples, make and utilize the compositions of the present disclosure and practice the claimed methods. The following working examples specifically point out various embodiments of the present disclosure, and are not to be construed as limiting in any way the remainder of the disclosure.

### Example 1: Expression of ZBTB32 in Cancer Cell Lines

[2870] This Example describes ZBTB32 expression in cancer cell lines.

[2871] ZBTB32 gene expression data in a variety of cancer cell lines was obtained from the Cancer Cell Line Encyclopedia (CCLE) database (Ghandi, M et al. Nature, 2019, 569:503-508). FIG. 1 shows ZBTB32 expression in the specified cell lines from RNAseq analysis. As shown in FIG. 1 and Table 27, cells expressing high level of ZBTB32 are mainly from hematopoietic and lymphoid tissue and in lymphoma, multiple myeloma and leukemia lineages.

TABLE 27
List of cell lines expressing ZBTB32 at the level above 5 transcripts per million (TPM).

| | | | ZBTB32 |
|---|---|---|---|
| | | | expression |
| Cell line | Primary site | Lineage | (TPM) |
| JVM2 | haematopoietic_and_lymphoid_tissue | Lymphoma: NH_B_cell | 290.205 |
| EHEB | haematopoietic_and_lymphoid_tissue | Leukemia: CLL | 144.784 |
| JVM3 | haematopoietic_and_lymphoid_tissue | Leukemia: CLL | 126.08 |
| REC1 | haematopoietic_and_lymphoid_tissue | Lymphoma: NH_B_cell | 115.949 |
| HUNS1 | haematopoietic_and_lymphoid_tissue | Multiple_Myeloma | 104.362 |
| SUPM2 | haematopoietic_and_lymphoid_tissue | Lymphoma: NH_T_cell | 75.58 |
| CI1 | haematopoietic_and_lymphoid_tissue | Lymphoma: NH_B_cell | 68.651 |
| KE97 | haematopoietic_and_lymphoid_tissue | Multiple_Myeloma | 62.521 |
| HH | haematopoietic_and_lymphoid_tissue | Leukemia: ALL | 62.373 |
| MEC1 | haematopoietic_and_lymphoid_tissue | Leukemia: CLL | 57.476 |
| MINO | haematopoietic_and_lymphoid_tissue | Lymphoma: NH_B_cell | 52.081 |
| AMO1 | haematopoietic_and_lymphoid_tissue | Multiple_Myeloma | 47.682 |
| SUDHL1 | haematopoietic_and_lymphoid_tissue | Lymphoma: NH_T_cell | 46.951 |
| MOLP2 | haematopoietic_and_lymphoid_tissue | Multiple_Myeloma | 46.313 |
| KIJK | haematopoietic_and_lymphoid_tissue | Lymphoma: NH_T_cell | 44.024 |
| KMH2 | haematopoietic_and_lymphoid_tissue | Lymphoma: Hodgkin | 43.974 |
| BDCM | haematopoietic_and_lymphoid_tissue | Leukemia: ALL | 40.659 |
| EB1 | haematopoietic_and_lymphoid_tissue | Lymphoma: NH_B_cell | 37.22 |
| A3KAW | haematopoietic_and_lymphoid_tissue | Lymphoma: NH_B_cell | 34.296 |
| HDLM2 | haematopoietic_and_lymphoid_tissue | Lymphoma: Hodgkin | 33.046 |
| L540 | haematopoietic_and_lymphoid_tissue | Lymphoma: Hodgkin | 31.756 |
| HUT102 | haematopoietic_and_lymphoid_tissue | Lymphoma: NH_T_cell | 29.964 |
| RAJI | haematopoietic_and_lymphoid_tissue | Lymphoma: NH_B_cell | 29.716 |
| L1236 | haematopoietic_and_lymphoid_tissue | Lymphoma: Hodgkin | 29.105 |
| MJ | haematopoietic_and_lymphoid_tissue | Lymphoma: NH_T_cell | 26.968 |
| KARPAS299 | haematopoietic_and_lymphoid_tissue | Lymphoma: NH_T_cell | 21.63 |
| SR786 | haematopoietic_and_lymphoid_tissue | Lymphoma: NH_T_cell | 21.568 |
| GRANTA519 | haematopoietic_and_lymphoid_tissue | Lymphoma: NH_B_cell | 19.375 |
| A4FUK | haematopoietic_and_lymphoid_tissue | Lymphoma: NH_B_cell | 16.359 |
| HS611T | haematopoietic_and_lymphoid_tissue | Lymphoma: Hodgkin | 14.464 |
| VMCUB1 | urinary_tract | Bladder: Carcinoma | 14.303 |
| JEKO1 | haematopoietic_and_lymphoid_tissue | Lymphoma: NH_B_cell | 13.751 |
| NUDHL1 | haematopoietic_and_lymphoid_tissue | Lymphoma: NH_B_cell | 13.246 |
| L428 | haematopoietic_and_lymphoid_tissue | Lymphoma: Hodgkin | 12.78 |
| NCIH854 | lung | Lung: NSCLC_Adeno | 12.137 |
| LS123 | large_intestine | Colorectal: Carcinoma | 11.889 |
| HEC108 | endometrium | Endometrium: Carcinoma | 10.45 |
| DEL | haematopoietic_and_lymphoid_tissue | Lymphoma: NH_T_cell | 10.141 |
| SNU719 | stomach | Gastric: Carcinoma | 10.113 |
| OCILY3 | haematopoietic_and_lymphoid_tissue | Lymphoma: NH_B_cell | 8.488 |
| SNU410 | pancreas | Pancreas: Carcinoma | 7.862 |
| BFTC905 | urinary_tract | Bladder: Carcinoma | 7.574 |
| MDAMB134VI | breast | Breast: Carcinoma | 7.131 |
| NCIH522 | lung | Lung: NSCLC_Adeno | 6.954 |
| LC1F | lung | Lung: NSCLC_Squamous | 6.347 |
| NCIH1355 | lung | Lung: NSCLC_Adeno | 5.994 |
| NCIH727 | lung | Endocrine | 5.908 |
| SW837 | large_intestine | Colorectal: Carcinoma | 5.876 |
| SBC5 | lung | Lung: SCLC | 5.564 |
| RERFGC1B | stomach | Gastric: Carcinoma | 5.395 |
| GCIY | stomach | Gastric: Carcinoma | 5.387 |
| DMS114 | lung | Lung: SCLC | 5.288 |
| MORCPR | lung | Lung: NSCLC_Adeno | 5.102 |
| DAUDI | haematopoietic_and_lymphoid_tissue | Lymphoma: NH_B_cell | 5.055 |

[2872] It has been shown that ZBTB32 is one the most consistently and differentially expressed genes in activated B cell subtype ofDLBCL (ABC-DLBCL) patients compared to other DLBCL types (Care et al. PLoS One. 2013; 8(2):e55895). Accordingly, RNA sequencing analysis showed much higher levels of ZBTB32 expression in ABC-DLBCL than germinal center B cell DLBCL (GCB-DLBCL) cell lines (Table 28).

TABLE 28
ZBTB32 Expression in ABC- and GCB-type of DLBCL Cell lines. CPM: counts per million reads

| | Type | | | | | | | | |
|---|---|---|---|---|---|---|---|---|---|
| | ABC | | | | | GCB | | | |
| Cell line | RC-K8 | HBL-1 | TMD-8 | OCI-Ly10 | OCI-Ly3 | Su-DHL10 | Su-DHL5 | Su-DHL4 | Su-DHL6 |
| ZBTB32 | 7.21 | 7.90 | 7.21 | 5.49 | 5.83 | −1.42 | 1.33 | −1.38 | −0.32 |
| expression | | | | | | | | | |
| (Log2CPM) | | | | | | | | | |

### Example 2: Enhanced CART Activity with ZBTB32 Knockout

[2873] This Example describes enhanced CART cell expansion, cytokine production, persistence, resistance to exhaustion and anti-tumor activity in vivo when ZBTB32 is knocked out in the CART cells.

### Material and Methods

### CART Generation

[2874] Frozen T cells previously isolated from fresh blood were thawed and activated with CD3/CD28 beads (Thermofisher) at a 1:3 cell to bead ratio on day 0. The following day, 10×10⁶ cells were plated in 6-well plate in 5 mL of T cell media without antibiotics and GFP (lacking CAR coding sequence) or CAR19-GFP virus was added dropwise (MOI=1). On day 3, CRISPR-Cas9 electroporation was performed to knock out ZBTB32 in the CAR19-GFP transduced cells as below. Denature RNA secondary structure by heating trRNA and gRNA in separate tubes to 98° C. for 2 minutes, and anneal by gradually decreasing temperature to 38° C. In a separate tube, create the RNP mixture by adding Cas9 buffer, Cas9 protein, trRNA and gRNA in order and mixing well after every addition. The final ratio of Cas9:tracerRNA:gRNA is 1:2:2. Incubate the samples at 37° C. for 10 minutes while preparing the cells. Collect T cells, spin down, wash with warm OPTI-MEM, spin down, and resuspend in T buffer (Neon Transfection System) at 20×10⁶ cells/ml. Mix 100 uL of T cells with 50 uL of RNP mix and incubate 5 minutes at room temperature. Using the Neon machine, cells were electroporated using the settings of 1600V, 1Oms, 3 pulses, and transferred to 6-well plates with complete T cell media. ZBTB32 gRNA6 sequence: CCAGCCGATCAGAGCCATAG (SEQ ID NO: 3004). ZBTB32 gRNA7 sequence: GCTCTGGAGCCAGAACCAGT (SEQ ID NO: 3005). From day 4 onwards, cells were expanded by adding fresh media every other day. Cells were frozen down using CS10 freezing media when cell size reached 400 fm.

### Next-Generation Sequencing (NGS) and T7 Endonuclease I (T7E1) Assay

[2875] Cells were harvested prior to freezing down and genomic DNA was isolated using the PureLink Genomic DNA Mini Kit (Invitrogen). DNA fragment around the editing site was amplified by PCR using the Q5 high fidelity master mix (NEB). ZBTB32 gRNA6 NGS F: 5′-CCACAGGCTTGAAATGAGATG-3′ (SEQ ID NO: 3006), ZBTB32 gRNA6 NGS R: 5′-CATACACAAAGTTCAGGAGC-3′ (SEQ ID NO: 3007), ZBTB32 gRNA7 NGS F: 5′-GACAAGAAGCTGCTGCCACA-3′ (SEQ ID NO: 3008), ZBTB32 gRNA7 NGS R: 5′-GGAACCTGGAAGGAACAGTG-3′ (SEQ ID NO: 3009). The PCR product was purified using the Qiagen PCR purification kit and submitted for NGS. To perform the T7E1 assay, DNA fragment around the editing site was amplified by PCR using the Q5 high fidelity master mix (NEB). ZBTB32 gRNA6 T7 F: 5′-ATTTCCATTCTCTCGCCACC-3′ (SEQ ID NO: 3010), ZBTB32 gRNA6 T7R: 5′-CTGGGCAAAGGTAGAAGGGC-3′ (SEQ ID NO: 3011), ZBTB32 gRNA7 T7 F: 5′-GGTCTAGTGCTCTGCCTCCA-3′ (SEQ ID NO: 3012), ZBTB32 gRNA7 T7R: 5′-GCGCCAACTCACTGTACCATT-3′ (SEQ ID NO: 3013). PCR product was purified and 200ng of purified DNA were denatured and slowly annealed using the 10×NEBuffer2. The T7 Endonuclease I (NEB) was added to the annealed PCR product incubated for 15 minutes at 37° C. No T7E1 enzyme was added for uncut controls. An electrophoresis gel was run with cut and uncut samples to determine if editing occurred.

### Antigen-Dependent Proliferation Assay

[2876] TMD8 cells were irradiated at 10,000 rad and 50,000 irradiated cells were plated in 100 ul of T cell media in a 96-well plate. GFP (non-CAR) T cells or CART cells were thawed, serially diluted for various effector to target cell (E:T) ratios (10:1, 5:1, 2.5:1, 1.25:1, 0.625:1 and 0.3125:1), and plated in 100 ul of T cell media on top of the irradiated TMD8 cells. Cells were incubated for 3 and 5 days and analyzed by flow cytometry using the live/dead, CD3, CD4, CD8 and GFP staining. GFP % is used to determine antigen-dependent proliferation kinetics.

### Antigen-Dependent Killing Assay

[2877] TMD8-luciferase cells were plated in 100 ul of T cell media in a 96-well plate (25,000/well). CART cells were thawed, serially diluted for various E:T ratios (10:1, 5:1, 2.5:1, 1.25:1, 0.625:1 and 0.3125:1), and plated in 100 ul of T cell media on top of the TMD8-luciferase cells. Cells were incubated for 48 and 72 hours. At each time point, 100 ul of media was collected for MSD according to manufacturer's instructions, and 100 ul of Bright Glo reagent (Promega) was added and incubated for 10 minutes at room temperature prior to reading luminescence. TMD8-luciferase cells alone was used as the 0% killing control.

### In Vivo Efficacy Study Using TMD8 Model

[2878] TMD8 cells were thawed and cultured exponentially in house, and collected for implant on day 0. At time of harvest, cells were washed and re-suspended in a 1:1 ratio of PBS without CaCl₂ or MgCl₂ and matrigel to a concentration of 5×10⁶ cells per 100 μl for implant. Cells were implanted subcutaneously in the right flank of immunocompromised NSG mice (Jackson Laboratory). Baseline body weight was also recorded at time of implant. On day 9, tumors were calipered and randomized based on tumor volume. The average tumor volume was 178.3 mm³. CART infusion was administered on day 10. GFP wt (non-CAR) T cells and CART cells were thawed and washed in RPMI 1640+10% Heat Inactivated Fetal Bovine Serum (FBS). Cells were counted on a Cellometer Vision (Nexcelcom), and washed again prior to being re-suspended in PBS for injection. Cells were re-suspended to a final concentration of 1×10⁶ CAR+ cells per 100 μl of PBS based on the percent of GFP positivity of each sample. In vivo injection was delivered intravenously in the tail vein of the mice. One group of mice received a 100 μl PBS injection as a negative control. Tumors volume and body weight were monitored 2-3 times per week thereafter.

[2879] Blood was collected via lateral tail vein puncture starting 2 weeks post CART infusion, and continued thereafter through week 6. At each time point, approximately 50 μl of whole blood was collected into EDTA coated capillary tubes. 30 μl of blood was plated to be stained for flow cytometry, and the remaining blood was spun down for 5 minutes at 13,000 rpm. Plasma was

Extracted from Tubes, Plated, and Stored at −80° C. for Cytokine Evaluation.

[2880] In Vivo efficacy study using TMD8-Luciferase model Six-week old female NSG mice were received from the Jackson Laboratory. Electronic transponders for animal identification were implanted on the left flank one day prior to tumor implantation. TMD8-Luc cells were cultured with RMPI-1640 medium containing 10% fetal bovine serum and 1% L-glutamine. Cells in logarithmic growth phase were harvested and washed once in cold sterile PBS. Cells were resuspended in a 1:1 ratio of PBS and matrigel at a concentration of 25×10⁶ per ml, placed on ice, and subcutaneously injected into the right flank of mice at 200 ul. Total cell number per mouse was 5×10⁶. Nine days after tumor implantation, mice were randomized. Wild type or ZBTB32KO gRNA6 CAR T cells were thawed, washed with RPMI 1640+10% Heat Inactivated Fetal Bovine Serum (FBS), and counted by a Cellometer Vision (Nexcelcom). CART cells centrifuged at 300 g for 10 minutes and resuspended at respective concentrations in cold PBS and kept on ice until injection. Mice were injected intravenously via the tail vein with 200 μl PBS (vehicle) or 200 ul PBS containing 2×10⁶ or 0.4×10⁶ wild type or ZBTB32KO gRNA6 CAR T cells. Tumors and body weight were monitored 2-3 times per week thereafter. TMD8-Luc cells express Luciferase. To measure the Luciferase signal, mice were IP injected with 15 mg/ml of luciferin substrate in a 200 ul dose and images were taken 10 minutes later for quantification.

### Flow Cytometry Analysis

[2881] Blood samples were transferred into 96-well U bottom plate (10-30 ul blood for each panel) and red blood cells were lysed by adding 150 ul per well of ACK lysing buffer (Quality Biological, Cat #118-156-721). After 2 minutes incubation at room temperature, 100 ul of Dulbecco's phosphate-buffered saline (DPBS) was added to each well, cells were spun down at 1500 rpm for 5 minutes and washed 200 ul DPBS. For cell surface and transcription factor panels, cells were directly processed to the staining procedures described below. For cytokine panel, to stimulate cytokine expression, cells were resuspended in 200 ul T cell culture media (RPMI1640+10% FBS+1× Sodium Pyruvate+1×NEAA+1× L-Glutamine+1× HEPES+1× 2-Mercaptoethanol+1×Penicillin/Streptomycin) containing PMA (Sigma, final concentration: 10 ng/ml) and Ionomycin (Sigma, final concentration: 1 ug/ml) and incubated at 37° C. incubator for 3 hours. Brefeldin A (BioLegend, final concentration: 10 ug/mL) was added to each well and cells were further incubated at 37° C. incubator for 1 hour. Cells were spun down at 1500 rpm for 5 minutes and washed with 200 ul DPBS.

[2882] Cells were then resuspended with 100 ul Zombie NIR in DPBS (1:1500). After 15 minutes incubation at room temperature in dark, cells were spinned down at 1800 rpm for 3 minutes and washed with FACS buffer (1000 mL DPBS+40 mL heat inactivated FBS+1 mL 0.5M EDTA pH8.0).

[2883] For cell surface staining, cells were resuspended with 50 ul FACS buffer containing mouse Fc blocking ab (Miltenyi, Cat #130-092-575, 1:25 dilution) and human Fc blocking ab (BD, Cat #564220, 1:10 dilution) and incubated at room temperature in dark for 20 minutes. Then 50 ul of 2×surface antibodies mixture in FACS buffer was added, mixed and incubated at room temperature in dark for 30 minutes. Cells were washed twice with FACS buffer and analyzed using BD Fortessa flow cytometer.

[2884] For intracellular staining, cells were resuspended with 200 ul 1× fixation/permeablization buffer (Invitrogen, Cat #00-5523-00), mixed and incubate at room temperature in dark for 30 minutes. Cells were washed twice with 200 ul 1× permeablization buffer, resuspended with 100 ul 1× intracellular antibodies mixture in 1× permeablization buffer and incubate at room temperature in dark for 30 minutes. Cells were washed with 200 ul 1× permeablization buffer and fixed with 200 uL 0.05 paraformaldehyde in DPBS at room temperature for 30 minutes. After fixation, cells were spinned down to remove paraformaldehyde and resuspended in 200 uL FACS buffer to be analyzed using BD Fortessa flow cytometer.

TABLE 29
List of flow antibodies

| | Color | Vendor | Clone | Cat# | Dilution |
|---|---|---|---|---|---|
| Surface | | | | | |
| L/D (Zombie | APC/Cy7 | Biolegend | | 423106 | 1:1500 |
| NIR) | | | | | |
| mCD11b | PerCP-Cy5.5 | BioLegend | M1/70 | 101228 | 1:100 |
| CD45 | APC | BioLegend | 2D1 | 368512 | 1:100 |
| CD3 | BV510 | BioLegend | OKT3 | 317332 | 1:50 |
| CD4 | BUV737 | BD | SK3 | 612748 | 1:100 |
| CD8 | BUV395 | BD | RPA-T8 | 563795 | 1:100 |
| TIGIT | BV421 | BioLegend | A15153G | 372710 | 1:100 |
| PD1 | PE-Dazzle594 | BioLegend | EH12.2H7 | 329940 | 1:100 |
| TIM3 | BV785 | BioLegend | F38-2E2 | 345032 | 1:100 |
| LAG3 | PE/Cy7 | BioLegend | 7H2C65 | 369208 | 1:100 |
| Transcription | | | | | |
| factors | | | | | |
| L/D (Zombie | APC/Cy7 | Biolegend | | 423106 | 1:1500 |
| NIR) | | | | | |
| CD45 | BV785 | BD | HI30 | 563716 | 1:100 |
| CD3 | BV510 | BioLegend | OKT3 | 317332 | 1:50 |
| CD4 | BUV737 | BD | SK3 | 612748 | 1:100 |
| CD8 | BUV395 | BD | RPA-T8 | 563795 | 1:100 |
| Eomes | PE/Cy7 | Thermo | WD1928 | 25-4877- | 1:100 |
| | | | | 42 | |
| Surface | | | | | |
| Tcf7 | AF647 | BioLegend | 7F11A10 | 655204 | 1:50 |
| Tox | PE | Miltenyi | REA473 | 130-120- | 1:100 |
| | | | | 716 | |
| Tbet | BV711 | BioLegend | 4B10 | 644820 | 1:100 |
| Cytokines | | | | | |
| L/D (Zombie | APC/Cy7 | Biolegend | | 423106 | 1:1500 |
| NIR) | | | | | |
| CD45 | BV785 | BD | HI30 | 563716 | 1:100 |
| CD3 | BV510 | BioLegend | OKT3 | 317332 | 1:50 |
| CD4 | BUV737 | BD | SK3 | 612748 | 1:100 |
| CD8 | BUV395 | BD | RPA-T8 | 563795 | 1:100 |
| IL2 | BV421 | BioLegend | MAQ1- | 500328 | 1:100 |
| | | | 17H12 | | |
| IFNg | PE/Cy7 | BioLegend | 4S.B3 | 502528 | 1:100 |
| TNFa | PerCP/Cy5.5 | BioLegend | MAb11 | 502926 | 1:100 |
| GranzB | APC | BioLegend | QA16A02 | 372204 | 1:100 |
| GranzK | AF594 | BioLegend | GM26E7 | 370506 | 1:100 |

CART Isolation from Spleens

[2885] At endpoint (day 53), all remaining 14-15 tumor free mice were sacrificed and their spleens were collected. Spleens were smashed through a 70 μm filter into −10 ml media (RPMI+10% FBS) in a 50 ml conical tube. Filter was washed with media to ensure that spleen cells are collected into the conical tube. Four or 5 spleens were pooled to one. Collection tubes were spun at 1500 rpm for 5 min, cell pallet was resuspended with 1 ml of ACK lysing buffer (Quality Biological, Cat #118-156-721) and incubated at room temperature for 2 minutes. Cells were washed with DPBS, stained with live/dead and processed to sort out GFP positive live cells using FACSAria sorter.

### Statistical Analyses

[2886] One-way ANOVA and unpaired t-test were performed to determine statistical differences using GraphPad Prism software.

### Results

[2887] To investigate the role of ZBTB32 in human T cell mediated anti-tumor immune responses, wild type (wt) and ZBTB32 KO CAR19-GFP T cells were generated. The CAR positivity was determined by GFP and anti-CD19 CAR idiotype antibody staining flow cytometry analysis (FIG. 2A) and the gene editing efficiency was verified by T7E1 cutting assay and NGS (FIGS. 2B-2C). As shown in FIG. 2A, CAR19 is expressed at similar levels in ZBTB32 knockout cells as compared to wild type cells with no ZBTB32 disruption. ZBTB32 KO CART cells also had similar antigen (CD19)-dependent proliferation and cancer cell killing as compared to wt CART cells in vitro (FIGS. 3A and 3B). ZBTB32 KO CART cells produced higher levels of pro-inflammatory cytokines IFNg, IL2 and TNFalpha when co-cultured with cancer cells in vitro (FIG. 3C).

[2888] Next, in vivo studies were performed using TMD8 and TMD8 Luciferase tumor models to evaluate the in vivo efficacy of wt and ZBTB32 KO CART-mediated anti-tumor immune responses. For the TMD8 model, 1×10⁶ CAR+ cells per mouse were transplanted and for the TMD8 luciferase tumor model, 0.4×10⁶ CAR+ cells/mouse and 0.4×10⁶ CAR+ cells/mouse were transplanted. The data from these experiments is shown in FIGS. 4-7.

[2889] For the first experiment in the TMD8 model, GFP wt (non-CAR), wt or ZBTB32 KO CART cells were injected at the dose of 1×106 CAR+ cells per mouse on day 10. As shown in FIGS. 4A-4B, animals treated with ZBTB32 KO CART cells (gRNA 6 or gRNA 7) had lower tumor volume at earlier time points (between time points day 25 to day 39) as compared to animals treated with wt CART cells. The data demonstrates that ZBTB32 KO CART cells have more rapid tumor control as compared to wt CART cells.

[2890] In the next experiment with the TMD8-Luc model, wt or ZBTB32 KO CART cells were injected at the dose of 2×106 CAR+ cells per mouse on day 9. As shown in FIGS. 5A-5B, tumor bearing animals treated with ZBTB32 KO CART cells had lower tumor volume as compared to animals treated with wt CART cells. The data demonstrates more rapid tumor control by ZBTB32 KO CART cells than wt CART cells. Bioluminescence imaging of animals bearing TMD8-Luc tumors treated with ZBTB32 KO CART cells showed more rapid tumor control by ZBTB32 KO CART cells than wt CART cells (FIG. 6A) and significantly lower bioluminescence on day 21 in the ZBTB32 KO CART cells treated mice than wt CART cells treated mice (FIG. 6B). Similarly, when tumor bearing mice were treated with 0.4×10⁶ CAR+ cells per mouse, more rapid tumor control by ZBTB32 KO CART cells than wt CART cells was observed (FIGS. 7A-7D). In addition, 3 out of 5 wt CART cells treated mice showed tumor relapse, while no ZBTB32 KO CART cells treated mice showed tumor relapse, highlighting better persistence of immune protection by ZBTB32 KO CART cells (FIGS. 7A-7D). The data from these experiments consistently shows that ZBTB32 KO CART cells are more potent in killing tumor cells, eliminate tumor cells more rapidly and have better long-term immune protection to prevent tumor relapse compared to wt CART cells in vivo (FIGS. 4-7).

[2891] T cell state is dynamically controlled by a set of transcription factors. TCF7 is a key transcription factor critical for the stem cell memory-like T cell (Tscm) state. It has been shown that TCF7⁺ CD8⁺ T cell frequency within tumor predicts response and better patient survival after PD-1 blockade in many human cancers. Transcription factor Eomes expression is low in Tscm cells and increased in exhausted or terminally differentiated CD8⁺ T cells. Recent studies identified TOX as a transcription factor epigenetically reprograming CD8 T cells to drive T cell exhaustion during chronic virus infection and cancer.

[2892] To investigate the relationship between ZBTB32 and T cell state, the effect of ZBTB32 knockout on the expression of T cell transcription factors in CART cells was evaluated. Flow cytometry analyses showed that ZBTB32 KO CART cells had higher levels of TCF7 and reduced levels of Eomes (FIGS. 8A-8D and FIGS. 13A-13B). The level of TOX was also lower in ZBTB32 KO CART cells (FIG. 13C). This data suggests that ZBTB32 regulates T cell state during anti-tumor immune responses in vivo.

[2893] Compared to wt CART cells, there were more total ZBTB32KO CART cells (CD4+ and CD8+ T cells) in the blood (FIGS. 9A-9C). A higher number of IL2, IFNg and TNFalpha cytokine producing ZBTB32KO CART cells in both the CD4+ T cell population (FIGS. 10A-10C) and CD8+ T cell population (FIGS. 10D-10F) was also observed

[2894] Importantly, ZBTB32 KO CART cells had significantly lower levels of exhaustion markers such as PD1, TIM3 and LAG3 as compared to wt CART cells (FIGS. 11A-11D and FIGS. 14A-14F). This data suggests that ZBTB32 KO CART cells are more resistant to exhaustion in vivo. In addition, when tumors were cleared in mice, a 3-5 fold higher number of ZBTB32KO CART cells were observed in the spleens of mice compared to the numbers of wt CART cells (FIG. 12A). Increase in total number of cells was also observed for both CD4+ CART cells and CD8+ CART cells in the spleen of mice (FIG. 12B-12C). This increase in the number of ZBTB32KO CART cells in mice after tumor clearance, indicates enhanced persistence of ZBTB32KO CART cells in vivo.

### SUMMARY

[2895] ZBTB32 knockout in CART cells enhances CART cell expansion, cytokine production, persistence, resistance to exhaustion and ultimately more potent and better long-term anti-tumor activity in vivo. This beneficial effect in CART cells could also be applicable for solid tumors by ZBTB32 inhibition alone or in combination with targeted or other 10 therapies given the regulation of ZBTB32 on key T cell transcription factors, exhaustion genes and T cell state.

### Example 3: Effect of ZBTB32 Knockout on Cancer Cells

[2896] This Example describes the effect of ZBTB32 knockout on the growth of cancer cells.

[2897] TMD8-cas9 stable cells were made by Cas9-containing lentivirus transduction and selected with 20 ug/ml Blasticidin. TMD8-cas9 cells were then infected with lentivirus containing non-targeting gRNA (gRNA NT, GTAGCGAACGTGTCCGGCGT (SEQ ID NO: 3014)) or ZBTB32 gRNA6 (CCAGCCGATCAGAGCCATAG (SEQ ID NO: 3004)) and selected with 0.5 ug/ml Puromycin.

[2898] To measure the cell growth kinetics in vitro, TMD8 gRNA NT or TMD8 ZBTB32 gRNA6 stable cells were seeded into 384-well plate and cell growth was determined using CellTiter-Glo luminescent cell viability kit at days 0, 1, 2, 3 and 4. As shown in FIG. 15A, knockout of ZBTB32 in TMD8 cells resulted in reduced cell proliferation in vitro compared to control cells.

[2899] To determine the tumor growth kinetics in vivo, TMD8 gRNA NT and TMD8 ZBTB32 gRNA6 cells were re-suspended in a 1:1 ratio of PBS without CaCl₂ or MgCl₂ and matrigel. After collecting and spinning at 1500 rpm for 5 minutes, cells were re-suspended to a concentration of 5×10⁶ cells per 100 μl for implantation. Cells were implanted subcutaneously in the right flank of NSG mice at Day 0 (5×10⁶ cells per mouse, 20 mice per group). Tumors were monitored via caliper measurements 2-3 times weekly. Mice were terminated as tumor volumes neared endpoint (>1000 mm³). At the end point (Day 23), there were 7 and 12 mice left in control (gRNA NT) and ZBTB32 KO TMD8 tumor groups, respectively.

[2900] Control (gRNA NT) TMD8 tumors consistently grew slightly faster than ZBTB32KO tumors. Slight decrease in mean tumor volume in control group on Day 23 can be attributed to the fact that several mice with tumors neared endpoint (>1000 mm³) had been sacrificed at the previous measurement on Day 21. FIGS. 15B-15C show that ZBTB32 KO TMD8 tumors consistently demonstrated delayed growth kinetics in vivo over time.

### EQUIVALENTS

[2901] The disclosures of each and every patent, patent application, and publication cited herein are hereby incorporated herein by reference in their entirety. While this disclosure has been disclosed with reference to specific embodiments, it is apparent that other embodiments and variations of this disclosure may be devised by others skilled in the art without departing from the true spirit and scope of the disclosure. The appended claims are intended to be construed to include all such embodiments and equivalent variations.

1. A cell expressing a chimeric antigen receptor (CAR),
wherein the CAR comprises an antigen-binding domain, a transmembrane domain, and an intracellular signaling domain, and
wherein the cell has reduced expression and/or a reduced biological activity of ZBTB32.

2. The cell of claim 1, wherein:
a) the cell has no detectable expression and/or biological activity of ZBTB32;
(b) the cell has reduced expression of ZBTB32;
(c) the level of ZBTB32 protein is reduced;
(d) the stability of ZBTB32 protein is reduced;
(e) the level of ZBTB32 mRNA is reduced;
(f) the stability of ZBTB32 mRNA is reduced;
(g) the cell has reduced ZBTB32 transcription;
(h) the cell has reduced ZBTB32 translation;
(i) the ZBTB32 genomic locus is altered, optionally wherein:
(1) the ZBTB32 gene comprises a deletion or insertion; and/or
(2) the ZBTB32 gene comprises an epigenomic modification;
(j) the cell has a reduced biological activity of ZBTB32;
(k) a transcription repressor function of ZBTB32 is reduced; or
(l) the interaction between ZBTB32 and one or more binding partners is reduced, optionally wherein the one or more binding partners comprise Fanconi anemia complementation group C (FANCC), thioredoxin interacting protein (TXNIP), Vitamin D3 upregulated protein 1 (VDUP1), Zinc finger and BTB domain-containing protein 16 (Zbtb16), Zinc-finger elbow-related proline domain protein 2 (Zpo2), GATA binding protein 3 (Gata3), GATA binding protein 2 (Gata2), or B-cell lymphoma 6 (Bcl-6).

3. The cell of claim 1, wherein the cell comprises a ZBTB32 inhibitor, or the cell has been contacted with, or is being contacted with, a ZBTB32 inhibitor, optionally wherein:
(a) the ZBTB32 inhibitor comprises a small molecule; or
(b) the ZBTB32 inhibitor comprises:
(1) a gene editing system targeting the ZBTB32 gene or one or more components thereof;
(2) a nucleic acid encoding one or more components of the gene editing system; or
(3) a combination of (1) and (2).

4.-5. (canceled)

6. The cell of claim 3, wherein the gene editing system:
(a) is a CRISPR/Cas system, a zinc finger nuclease system, a TALEN system, or a meganuclease system;
(b) binds to a target sequence in the ZBTB32 gene;
(c) binds to a target sequence in an early exon or intron of the ZBTB32 gene;
(d) binds to a target sequence of the ZBTB32 gene, and the target sequence is upstream of exon 4;
(e) binds to a target sequence in a late exon or intron of the ZBTB32 gene;
(f) binds to a target sequence that is downstream of a preantepenultimate exon of the ZBTB32 gene;
(g) binds to a target sequence that comprises a splice junction of the ZBTB32 gene;
(h) binds to a target sequence in a coding region of the ZBTB32 gene;
(i) binds to a target sequence in a non-coding region of the ZBTB32 gene;
(j) binds to a target sequence in a regulatory element of the ZBTB32 gene; or
(k) is a CRISPR/Cas system comprising a guide RNA (gRNA) molecule comprising a targeting sequence which hybridizes to a target sequence of the ZBTB32 gene.

7.-16. (canceled)

17. The cell of claim 3, wherein the ZBTB32 inhibitor comprises:
(a) a small interfering RNA (siRNA) or a small hairpin RNA (shRNA) targeting the ZBTB32 gene, or a nucleic acid encoding the siRNA or shRNA, optionally wherein the siRNA or shRNA comprises a nucleotide sequence complementary to a sequence of an mRNA of the ZBTB32 gene;
(b) an antisense oligonucleotide (ASO) targeting the ZBTB32 gene, or a nucleic acid encoding the ASO, optionally wherein the ASO comprises a nucleotide sequence complementary to a sequence of an mRNA of the ZBTB32 gene;
(c) a protein;
(d) a dominant negative variant of a protein encoded by the ZBTB32 gene, or a nucleic acid encoding the dominant negative variant;
(e) a dominant negative binding partner of a protein encoded by the ZBTB32 gene, or a nucleic acid encoding the dominant negative binding partner; or
(f) an antibody molecule which binds to a protein encoded by the ZBTB32 gene, or a nucleic acid encoding the antibody molecule, optionally wherein the antibody molecule comprises a single-domain antibody (sdAb) or nanobody that binds to a protein encoded by the ZBTB32 gene.

18.-39. (canceled)

40. The cell of claim 1, wherein the cell:
(a) has an enhanced T cell-mediated anti-tumor response;
(b) has increased proliferation and/or cytokine production;
(c) has an altered T cell state;
(d) has enhanced resistance to exhaustion and enhanced long-term immune protection in vivo;
(e) has an increased expression of MHCII or MHCII transactivator CIITA;
(f) expands at a higher rate in vivo compared to a reference cell;
(g) has an improved immunological memory phenotype;
(h) is a human cell; or
(i) has reduced expression and/or a reduced biological activity of Tet2 or IKZF2.

41.-46. (canceled)

47. The cell of claim 1, wherein the cell is an immune effector cell or a population of immune effector cells,
optionally wherein the immune effector cell is a T cell, a B cell, or an NK cell, optionally wherein the T cell is:
(a) an alpha beta T cell (aβ T cell);
(b) a CD4+ T cell, a CD8+ T cell, or a combination thereof;
(c) a CD8+ T cell or regulatory T cell (Treg);
(d) a gamma delta T cell (γδ T cell); or
(e) a chimeric antigen receptor T (CART) cell.

48.-59. (canceled)

60. The cell of claim 1, wherein:
(a) the antigen-binding domain binds to a tumor antigen selected from a group consisting of: TSHR, CD19, CD123, CD22, CD30, CD171, CS-1, CLL-1, CD33, EGFRvIII, GD2, GD3, BCMA, Tn Ag, PSMA, ROR1, FLT3, FAP, TAG72, CD38, CD44v6, CEA, EPCAM, B7H3, KIT, IL-13Ra2, Mesothelin, IL-11Ra, PSCA, PRSS21, VEGFR2, LewisY, CD24, PDGFR-beta, SSEA-4, CD20, Folate receptor alpha, ERBB2 (Her2/neu), MUC1, EGFR, NCAM, Prostase, PAP, ELF2M, Ephrin B2, IGF-I receptor, CAIX, LMP2, gp100, bcr-abl, tyrosinase, EphA2, Fucosyl GM1, sLe, GM3, TGS5, HMWMAA, o-acetyl-GD2, Folate receptor beta, TEM1/CD248, TEM7R, CLDN6, GPRC5D, CXORF61, CD97, CD179a, ALK, Polysialic acid, PLAC1, GloboH, NY-BR-1, UPK2, HAVCR1, ADRB3, PANX3, GPR20, LY6K, OR51E2, TARP, WT1, NY-ESO-1, LAGE-1a, MAGE-A1, legumain, HPV E6, E7, MAGE A1, ETV6-AML, sperm protein 17, XAGE1, Tie 2, MAD-CT-1, MAD-CT-2, Fos-related antigen 1, p53, p⁵³ mutant, prostein, survivin and telomerase, PCTA-1/Galectin 8, MelanA/MART1, Ras mutant, hTERT, sarcoma translocation breakpoints, ML-IAP, ERG (TMPRSS2 ETS fusion gene), NA17, PAX3, Androgen receptor, Cyclin B1, MYCN, RhoC, TRP-2, CYP1B1, BORIS, SART3, PAX5, OY-TES1, LCK, AKAP-4, SSX2, RAGE-1, human telomerase reverse transcriptase, RU1, RU2, intestinal carboxyl esterase, mut hsp70-2, CD79a, CD79b, CD72, LAIR1, FCAR, LILRA2, CD300LF, CLEC12A, BST2, EMR2, LY75, GPC3, FCRL5, and IGLL1;
(b) the intracellular signaling domain comprises a primary signaling domain and/or a costimulatory signaling domain, wherein the primary signaling domain comprises a functional signaling domain of a protein chosen from CD3 zeta, CD3 gamma, CD3 delta, CD3 epsilon, common FcR gamma (FCER1G), FcR beta (Fc Epsilon Rib), CD79a, CD79b, Fc gamma RIIa, DAP10, or DAP12; or
(c) the intracellular signaling domain comprises a costimulatory signaling domain, or a primary signaling domain and a costimulatory signaling domain, wherein the costimulatory signaling domain comprises a functional signaling domain of a protein selected from the group consisting of CD27, CD28, 4-1BB (CD137), OX40, CD30, CD40, PD-1, ICOS, lymphocyte function-associated antigen-1 (LFA-1), CD2, CD7, LIGHT, NKG2C, B7-H3, a ligand that specifically binds with CD83, CDS, ICAM-1, GITR, BAFFR, HVEM (LIGHTR), SLAMF7, NKp80 (KLRF1), CD160, CD19, CD4, CD8alpha, CD8beta, IL2R beta, IL2R gamma, IL7R alpha, ITGA4, VLA1, CD49a, ITGA4, IA4, CD49D, ITGA6, VLA-6, CD49f, ITGAD, CD11d, ITGAE, CD103, ITGAL, CD11a, LFA-1, ITGAM, CD11b, ITGAX, CD11c, ITGB1, CD29, ITGB2, CD18, LFA-1, ITGB7, TNFR2, TRANCE/RANKL, DNAM1 (CD226), SLAMF4 (CD244, 2B4), CD84, CD96 (Tactile), CEACAM1, CRTAM, Ly9 (CD229), CD160 (BY55), PSGL1, CD100 (SEMA4D), CD69, SLAMF6 (NTB-A, Ly108), SLAM (SLAMF1, CD150, IPO-3), BLAME (SLAMF8), SELPLG (CD162), LTBR, LAT, GADS, SLP-76, PAG/Cbp, NKp44, NKp30, NKp46, and NKG2D.

61.-75. (canceled)

76. A method of increasing the therapeutic efficacy of the CAR-expressing cell of claim 1, comprising:
reducing the expression and/or a biological activity of ZBTB32 in the cell,
thereby increasing the therapeutic efficacy of the CAR-expressing cell.

77. A method of increasing the therapeutic efficacy of the CAR-expressing cell of claim 1, comprising:
contacting the cell with a ZBTB32 inhibitor,
thereby increasing the therapeutic efficacy of the CAR-expressing cell optionally wherein the inhibitor is:
(a) a small molecule that reduces the expression and/or a biological activity of ZBTB32;
(b) a gene editing system targeting the ZBTB32 gene;
(c) a nucleic acid that inhibits expression of ZBTB32, optionally wherein the nucleic acid comprises an siRNA, shRNA, or ASO;
(d) a dominant negative variant of a protein encoded by the ZBTB32 gene, or a binding partner of a protein encoded by the ZBTB32 gene;
(e) an antibody molecule that binds to a protein encoded by the ZBTB32 gene, optionally wherein the antibody molecule comprises a single-domain antibody (sdAb) or nanobody;
(f) a nucleic acid encoding (b) or a component thereof or any of (c)-(d); or
(g) any combination of (a)-(f);
optionally wherein:
(i) the cell is contacted with the ZBTB32 inhibitor ex vivo;
(ii) the cell is contacted with the ZBTB32 inhibitor in vivo, optionally wherein the cell is contacted with the ZBTB32 inhibitor in vivo prior to delivery of a nucleic acid encoding a CAR into the cell or after the cells have been administered to a subject in need thereof;
(iii) the method further comprises contacting the cell with a Tet2 inhibitor or an IKZF2 inhibitor; or
(iv) the cell has been contacted with a Tet2 or an IKZF2 inhibitor.

78.-86. (canceled)

87. A method for treating a cancer in a subject, the method comprising administering to the subject an effective amount of the cell of claim 1.

88. (canceled)

89. The method of claim 87, wherein the cancer is:
(a) a hematological cancer, optionally wherein the cancer is a lymphoma, a myeloma, or a leukemia;
(b) a B cell malignancy, optionally wherein the B cell malignancy is a B cell lymphoma or leukemia;
(c) a lymphoma, optionally wherein the lymphoma is a non-Hodgkin's lymphoma or a diffuse large B-cell lymphoma (DLBCL);
(d) a myeloma, optionally wherein the myeloma is a multiple myeloma (MM);
(e) a leukemia, optionally wherein the leukemia is an acute lymphocytic leukemia (ALL) or a chronic lymphocytic leukemia (CLL);
(d) a solid tumor, optionally wherein the solid tumor is associated with immune cell infiltration;
(e) a chronic lymphocytic leukemia (CLL), acute myeloid leukemia (AML), acute lymphoblastic leukemia (ALL), B-cell acute lymphoblastic leukemia (B-ALL), T-cell acute lymphoblastic leukemia (T-ALL), chronic myelogenous leukemia (CML), B cell prolymphocytic leukemia, blastic plasmacytoid dendritic cell neoplasm, Burkitt's lymphoma, diffuse large B cell lymphoma, follicular lymphoma, hairy cell leukemia, small cell- or a large cell-follicular lymphoma, a malignant lymphoproliferative condition, MALT lymphoma, mantle cell lymphoma, marginal zone lymphoma, multiple myeloma, myelodysplasia and myelodysplastic syndrome, non-Hodgkin's lymphoma, Hodgkin's lymphoma, plasmablastic lymphoma, plasmacytoid dendritic cell neoplasm, Waldenström macroglobulinemia, or pre-leukemia: or
(f) a colon cancer, rectal cancer, renal-cell carcinoma, liver cancer, non-small cell carcinoma of the lung, cancer of the small intestine, cancer of the esophagus, melanoma, bone cancer, pancreatic cancer, skin cancer, cancer of the head or neck, cutaneous or intraocular malignant melanoma, uterine cancer, ovarian cancer, rectal cancer, cancer of the anal region, stomach cancer, testicular cancer, uterine cancer, carcinoma of the fallopian tubes, carcinoma of the endometrium, carcinoma of the cervix, carcinoma of the vagina, carcinoma of the vulva, Hodgkin's disease, non-Hodgkin's lymphoma, cancer of the endocrine system, cancer of the thyroid gland, cancer of the parathyroid gland, cancer of the adrenal gland, sarcoma of soft tissue, cancer of the urethra, cancer of the penis, solid tumors of childhood, cancer of the bladder, cancer of the kidney or ureter, carcinoma of the renal pelvis, neoplasm of the central nervous system (CNS), primary CNS lymphoma, tumor angiogenesis, spinal axis tumor, brain stem glioma, pituitary adenoma, Kaposi's sarcoma, epidermoid cancer, squamous cell cancer, T-cell lymphoma, an environmentally induced cancer, or a metastatic lesion thereof.

90.-96. (canceled)

97. The method of claim 87, wherein:
(a) the cancer expresses a higher level of ZBTB32;
(b) the method further comprises administering to the subject a second therapeutic agent or modality; or
(c) the method further comprises administering to the subject a ZBTB32 inhibitor.

98.-99. (canceled)

100. A method of treating a subject in need thereof, the method comprising administering a CAR-expressing cell therapy comprising the cell of claim 1, in combination with a ZBTB32 inhibitor, optionally wherein:
(a) the subject receives a pre-treatment of the ZBTB32 inhibitor prior to the initiation of the CAR-expressing cell therapy;
(b) the subject receives concurrent treatment with the ZBTB32 inhibitor and the CAR expressing cell therapy;
(c) the subject receives treatment with the ZBTB32 inhibitor post-CAR-expressing cell therapy;
(d) the subject has a disease associated with expression of a tumor antigen, e.g., a proliferative disease, a precancerous condition, a cancer, or a non-cancer related indication associated with expression of the tumor antigen; or
(e) the method further comprises determining the expression or a biological activity of ZBTB32 in the cell.

101.-115. (canceled)

116. A method of treating a subject, the method comprising:
administering to the subject an effective amount of a ZBTB32 inhibitor,
thereby treating the subject,
wherein the subject has received, is receiving, or is about to receive therapy comprising the CAR-expressing cell of claim 1.

117. (canceled)

118. A method of manufacturing the CAR-expressing cell of claim 1, comprising:
introducing a nucleic acid encoding a CAR into a cell such that said nucleic acid (or CAR-encoding portion thereof) integrates into the genome of the cell, such that the expression or a biological activity of ZBTB32 is reduced,
thereby manufacturing the CAR-expressing cell, optionally wherein:
(a) the nucleic acid integrates within the ZBTB32 gene; or
(b) the nucleic acid integrates within a gene other than the ZBTB32 gene.

119.-121. (canceled)

122. A method of manufacturing the CAR-expressing cell of claim 1, comprising:
contacting a CAR-expressing cell ex vivo with a ZBTB32 inhibitor, thereby manufacturing the CAR-expressing cell,
optionally wherein the CAR-expressing cell has an improved property compared to the same CAR-expressing cell that has not been contacted ex vivo with the ZBTB32 inhibitor;
optionally wherein the improved property comprises an enhanced T cell-mediated anti-tumor response, an increased proliferation and/or cytokine production, a reduced T cell exhaustion, an enhanced resistance to exhaustion and enhanced long-term immune protection in vivo, an increased expression of MHCII and/or MHCII transactivator CIITA, a higher expansion rate in vivo, an improved immunological memory phenotype, or any combination thereof.

123.-125. (canceled)

126. A vector comprising a nucleotide sequence encoding the CAR expressed by the cell of claim 1 and a nucleotide sequence encoding a ZBTB32 inhibitor, optionally wherein:
(1) the inhibitor is:
(a) a gene editing system targeting the ZBTB32 gene;
(b) a nucleic acid that inhibits expression of ZBTB32, optionally wherein the nucleic acid comprises an siRNA, shRNA, or ASO;
(c) a dominant negative variant of a protein encoded by the ZBTB32 gene, or a binding partner of a protein encoded by the ZBTB32 gene;
(d) an antibody molecule that binds to a protein encoded by the ZBTB32 gene, optionally wherein the antibody molecule comprises a single-domain antibody (sdAb) or nanobody; or
(e) any combination of (a)-(d); or
(2) the nucleotide sequence encoding the CAR and the nucleotide sequence encoding the inhibitor are separated by a 2A site.

127.-128. (canceled)

129. A composition for ex vivo manufacture of the CAR-expressing cell of claim 1, comprising a ZBTB32 inhibitor, optionally wherein the inhibitor is:
(a) a small molecule that reduces the expression and/or a biological activity of ZBTB32;
(b) a gene editing system targeting the ZBTB32 gene;
(c) a nucleic acid that inhibits expression of ZBTB32, optionally wherein the nucleic acid comprises an siRNA, shRNA, or ASO;
(d) a dominant negative variant of a protein encoded by the ZBTB32 gene, or a binding partner of a protein encoded by the ZBTB32 gene;
(e) an antibody molecule that binds to a protein encoded by the ZBTB32 gene, optionally wherein the antibody molecule comprises a single-domain antibody (sdAb) or nanobody;
(f) a nucleic acid encoding (b) or a component thereof, (c), or (d); or
(g) any combination of (a)-(f).

130. (canceled)

131. A population of cells comprising one or more of the cell of claim 1, wherein;
(a) the population of cells comprises a higher percentage of cells having a phenotype or expressing a marker associated with a central memory T (T_{CM}) cell or a stem memory T (T_{SCM}) cell) than a reference population of cells; wherein:
(b) the percentage of cytokine producing cells in the population is at least 50% higher than that of a reference population of cells, wherein the reference population of cells is:
(i) a population of cells which does not comprise one or more cells in which the expression of ZBTB32 in the cell has been reduced; or
(ii) a population of cells which does not comprise one or more cells in which the biological activity of ZBTB32 in the cell has been reduced; or
(c) at least 50% of the population of cells have a phenotype or express a marker associated with a central memory T (T_{CM}) cell or a stem memory T (T_{SCM}) cell.

132.-135. (canceled)

136. A method of treating a cancer in a subject, comprising:
administering to the subject an effective amount of a ZBTB32 inhibitor and a second therapeutic agent or modality,
thereby threating the cancer in the subject, optionally wherein:
(i) the ZBTB32 inhibitor is administered prior to, concurrently with, or post administration of the second therapeutic agent or modality;
(ii) the ZBTB32 inhibitor comprises a small molecule;
(iii) the ZBTB32 inhibitor comprises:
(1) a gene editing system targeting the ZBTB32 gene or one or more components thereof;
(2) a nucleic acid encoding one or more components of the gene editing system; or
(3) a combination of (1) and (2).

137.-206. (canceled)

207. A method of increasing the efficacy of a therapeutic agent or modality, comprising:
administering to the subject an effective amount of a ZBTB32 inhibitor,
thereby increasing the efficacy of the therapeutic agent of modality, optionally wherein:
(a) the subject has a cancer; or
(b) the therapeutic agent or modality comprises an immunotherapy or a cell therapy.

208.-210. (canceled)

211. A method of increasing an immune response in a subject, comprising:
administering to the subject an effective amount of a ZBTB32 inhibitor,
thereby increasing the immune response in the subject,
optionally wherein:
(a) the subject has a cancer; or
(b) the subject has received, or is receiving, a second therapeutic agent or modality.

212.-214. (canceled)

215. A method of inhibiting the expression or a biological activity of ZBTB32, comprising:
contacting a cell with a ZBTB32 inhibitor; and
optionally further contacting the cell with a second therapeutic agent or modality;
thereby treating the cell,
optionally wherein the ZBTB32 inhibitor is contacted with the cell in vitro, ex vivo, or in vivo.

216. (canceled)

217. A gene editing system targeting the ZBTB32 gene, optionally wherein the gene editing system is a CRISPR/Cas gene editing system, a zinc finger nuclease system, a TALEN system, or a meganuclease system.

218.-222. (canceled)

The application's sequence listing, which the Patent Office published only in electronic form, follows.

SEQUENCE LISTING (3228 sequences)

SEQ ID NO: 1 - protein, 121 aa, Artificial Sequence
  source: /note="Description of Artificial Sequence: Synthetic polypeptide"
EVQLVESGGGLVQSGGSLRLSCAASGFSLSSYGVDWVRQAPGKGLEWVGVIWGGGGTYYASSLMGRFTISRDNSKNTLYLQMNSLRAEDTAVYYCARHAYGHDGGFAMDYWGQGTLVTVSS

SEQ ID NO: 2 - protein, 107 aa, Artificial Sequence
  source: /note="Description of Artificial Sequence: Synthetic polypeptide"
EIVMTQSPATLSVSPGERATLSCRASESVSSNVAWYQQRPGQAPRLLIYGASNRATGIPARFSGSGSGTDFTLTISRLEPEDFAVYYCGQSYSYPFTFGQGTKLEIK

SEQ ID NO: 3 - protein, 451 aa, Artificial Sequence
  source: /note="Description of Artificial Sequence: Synthetic polypeptide"
EVQLVESGGGLVQSGGSLRLSCAASGFSLSSYGVDWVRQAPGKGLEWVGVIWGGGGTYYASSLMGRFTISRDNSKNTLYLQMNSLRAEDTAVYYCARHAYGHDGGFAMDYWGQGTLVTVSSASTKGPSVFPLAPSSKSTSGGTAALGCLVKDYFPEPVTVSWNSGALTSGVHTFPAVLQSSGLYSLSSVVTVPSSSLGTQTYICNVNHKPSNTKVDKRVEPKSCDKTHTCPPCPAPELLGGPSVFLFPPKPKDTLMISRTPEVTCVVVDVSHEDPEVKFNWYVDGVEVHNAKTKPREEQYNSTYRVVSVLTVLHQDWLNGKEYKCKVSNKALPAPIEKTISKAKGQPREPQVYTLPPSREEMTKNQVSLTCLVKGFYPSDIAVEWESNGQPENNYKTTPPVLDSDGSFFLYSKLTVDKSRWQQGNVFSCSVMHEALHNHYTQKSLSLSPGK

SEQ ID NO: 4 - protein, 214 aa, Artificial Sequence
  source: /note="Description of Artificial Sequence: Synthetic polypeptide"
EIVMTQSPATLSVSPGERATLSCRASESVSSNVAWYQQRPGQAPRLLIYGASNRATGIPARFSGSGSGTDFTLTISRLEPEDFAVYYCGQSYSYPFTFGQGTKLEIKRTVAAPSVFIFPPSDEQLKSGTASVVCLLNNFYPREAKVQWKVDNALQSGNSQESVTEQDSKDSTYSLSSTLTLSKADYEKHKVYACEVTHQGLSSPVTKSFNRGEC

SEQ ID NO: 5 - DNA, 363 bp, Artificial Sequence
  source: /note="Description of Artificial Sequence: Synthetic polynucleotide"
gaggtgcagctggtggaatctggcggcggactggtgcagtccggcggctctctgagactgtcttgcgctgcctccggcttctccctgtcctcttacggcgtggactgggtgcgacaggcccctggcaagggcctggaatgggtgggagtgatctggggcggaggcggcacctactacgcctcttccctgatgggccggttcaccatctcccgggacaactccaagaacaccctgtacctgcagatgaactccctgcgggccgaggacaccgccgtgtactactgcgccagacacgcctacggccacgacggcggcttcgccatggattattggggccagggcaccctggtgacagtgtcctcc

SEQ ID NO: 6 - DNA, 321 bp, Artificial Sequence
  source: /note="Description of Artificial Sequence: Synthetic polynucleotide"
gagatcgtgatgacccagtcccccgccaccctgtctgtgtctcccggcgagagagccaccctgagctgcagagcctccgagtccgtgtcctccaacgtggcctggtatcagcagagacctggtcaggcccctcggctgctgatctacggcgcctctaaccgggccaccggcatccctgccagattctccggctccggcagcggcaccgacttcaccctgaccatctcccggctggaacccgaggacttcgccgtgtactactgcggccagtcctactcataccccttcaccttcggccagggcaccaagctggaaatcaag

SEQ ID NO: 7 - DNA, 1353 bp, Artificial Sequence
  source: /note="Description of Artificial Sequence: Synthetic polynucleotide"
gaggtgcagctggtggaatctggcggcggactggtgcagtccggcggctctctgagactgtcttgcgctgcctccggcttctccctgtcctcttacggcgtggactgggtgcgacaggcccctggcaagggcctggaatgggtgggagtgatctggggcggaggcggcacctactacgcctcttccctgatgggccggttcaccatctcccgggacaactccaagaacaccctgtacctgcagatgaactccctgcgggccgaggacaccgccgtgtactactgcgccagacacgcctacggccacgacggcggcttcgccatggattattggggccagggcaccctggtgacagtgtcctccgctagcaccaagggcccaagtgtgtttcccctggcccccagcagcaagtctacttccggcggaactgctgccctgggttgcctggtgaaggactacttccccgagcccgtgacagtgtcctggaactctggggctctgacttccggcgtgcacaccttccccgccgtgctgcagagcagcggcctgtacagcctgagcagcgtggtgacagtgccctccagctctctgggaacccagacctatatctgcaacgtgaaccacaagcccagcaacaccaaggtggacaagagagtggagcccaagagctgcgacaagacccacacctgccccccctgcccagctccagaactgctgggagggccttccgtgttcctgttcccccccaagcccaaggacaccctgatgatcagcaggacccccgaggtgacctgcgtggtggtggacgtgtcccacgaggacccagaggtgaagttcaactggtacgtggacggcgtggaggtgcacaacgccaagaccaagcccagagaggagcagtacaacagcacctacagggtggtgtccgtgctgaccgtgctgcaccaggactggctgaacggcaaagaatacaagtgcaaagtctccaacaaggccctgccagccccaatcgaaaagacaatcagcaaggccaagggccagccacgggagccccaggtgtacaccctgccccccagccgggaggagatgaccaagaaccaggtgtccctgacctgtctggtgaagggcttctaccccagcgatatcgccgtggagtgggagagcaacggccagcccgagaacaactacaagaccacccccccagtgctggacagcgacggcagcttcttcctgtacagcaagctgaccgtggacaagtccaggtggcagcagggcaacgtgttcagctgcagcgtgatgcacgaggccctgcacaaccactacacccagaagtccctgagcctgagccccggcaag

SEQ ID NO: 8 - DNA, 642 bp, Artificial Sequence
  source: /note="Description of Artificial Sequence: Synthetic polynucleotide"
gagatcgtgatgacccagtcccccgccaccctgtctgtgtctcccggcgagagagccaccctgagctgcagagcctccgagtccgtgtcctccaacgtggcctggtatcagcagagacctggtcaggcccctcggctgctgatctacggcgcctctaaccgggccaccggcatccctgccagattctccggctccggcagcggcaccgacttcaccctgaccatctcccggctggaacccgaggacttcgccgtgtactactgcggccagtcctactcataccccttcaccttcggccagggcaccaagctggaaatcaagcgtacggtggccgctcccagcgtgttcatcttcccccccagcgacgagcagctgaagagcggcaccgccagcgtggtgtgcctgctgaacaacttctacccccgggaggccaaggtgcagtggaaggtggacaacgccctgcagagcggcaacagccaggagagcgtcaccgagcaggacagcaaggactccacctacagcctgagcagcaccctgaccctgagcaaggccgactacgagaagcataaggtgtacgcctgcgaggtgacccaccagggcctgtccagccccgtgaccaagagcttcaacaggggcgagtgc

SEQ ID NO: 9 - protein, 5 aa, Artificial Sequence
  source: /note="Description of Artificial Sequence: Synthetic peptide"
SYGVD

SEQ ID NO: 10 - protein, 7 aa, Artificial Sequence
  source: /note="Description of Artificial Sequence: Synthetic peptide"
GFSLSSY

SEQ ID NO: 11 - protein, 16 aa, Artificial Sequence
  source: /note="Description of Artificial Sequence: Synthetic peptide"
VIWGGGGTYYASSLMG

SEQ ID NO: 12 - protein, 5 aa, Artificial Sequence
  source: /note="Description of Artificial Sequence: Synthetic peptide"
WGGGG

SEQ ID NO: 13 - DNA, 521 bp, Artificial Sequence
  source: /note="Description of Artificial Sequence: Synthetic polynucleotide"
agcttatggtgccccaaccccaacgcggaaaaggttccgtcgggacccaaacgcgtccctgcgccgacgagacccgcaccaaggccctttgcgtcgccgcggctgggacccagagcgtgtaagaagtgcaggcaagcgtcgcagtgggcctagaagcggcgatgggaacacccggggggccgctgcgaaggacgaggcggggattcagcccttccaaggaacgccaagcgccgcacggcctgcactatttgccttcggcgtgcagagtgatcatgggagcgtctgcctgtcgcggtccctcgttaccgtcgcgcggctggcgctacccgacaccggttatcgccgacgagtcgtcccgcgcggctctcgtcgccggcccttccccgccacgccctccgccccacaccccgccatcacacccgggacaaggacgggcgcgccacaaggcgtaagacgttcggaggcctcgcgtgcagccgtcagccgagggagcaactggcttagtggctggagagaggggt

SEQ ID NO: 14 - DNA, 726 bp, Artificial Sequence
  source: /note="Description of Artificial Sequence: Synthetic polynucleotide"
gacatccagatgacacagactacatcctccctgtctgcctctctgggagacagagtcaccatcagttgcagggcaagtcaggacattagtaaatatttaaattggtatcagcagaaaccagatggaactgttaaactcctgatctaccatacatcaagattacactcaggagtcccatcaaggttcagtggcagtgggtctggaacagattattctctcaccattagcaacctggagcaagaagatattgccacttacttttgccaacagggtaatacgcttccgtacacgttcggaggggggaccaagctggagatcacaggtggcggtggctcgggcggtggtgggtcgggtggcggcggatctgaggtgaaactgcaggagtcaggacctggcctggtggcgccctcacagagcctgtccgtcacatgcactgtctcaggggtctcattacccgactatggtgtaagctggattcgccagcctccacgaaagggtctggagtggctgggagtaatatggggtagtgaaaccacatactataattcagctctcaaatccagactgaccatcatcaaggacaactccaagagccaagttttcttaaaaatgaacagtctgcaaactgatgacacagccatttactactgtgccaaacattattactacggtggtagctatgctatggactactggggccaaggaacctcagtcaccgtctcctca

SEQ ID NO: 15 - protein, 242 aa, Artificial Sequence
  source: /note="Description of Artificial Sequence: Synthetic polypeptide"
DIQMTQTTSSLSASLGDRVTISCRASQDISKYLNWYQQKPDGTVKLLIYHTSRLHSGVPSRFSGSGSGTDYSLTISNLEQEDIATYFCQQGNTLPYTFGGGTKLEITGGGGSGGGGSGGGGSEVKLQESGPGLVAPSQSLSVTCTVSGVSLPDYGVSWIRQPPRKGLEWLGVIWGSETTYYNSALKSRLTIIKDNSKSQVFLKMNSLQTDDTAIYYCAKHYYYGGSYAMDYWGQGTSVTVSS

SEQ ID NO: 16 - protein, 7 aa, Artificial Sequence
  source: /note="Description of Artificial Sequence: Synthetic peptide"
GASNRAT

SEQ ID NO: 17 - protein, 3 aa, Artificial Sequence
  source: /note="Description of Artificial Sequence: Synthetic peptide"
GAS

SEQ ID NO: 18 - protein, 9 aa, Artificial Sequence
  source: /note="Description of Artificial Sequence: Synthetic peptide"
GQSYSYPFT

SEQ ID NO: 19 - protein, 6 aa, Artificial Sequence
  source: /note="Description of Artificial Sequence: Synthetic peptide"
SYSYPF

SEQ ID NO: 20 - protein, 124 aa, Artificial Sequence
  source: /note="Description of Artificial Sequence: Synthetic polypeptide"
QVQLVESGGGVVQPGRSLRLSCAASGFTFSSYGMHWVRQAPGKGLEWVAVIWYEGSNKYYADSVKGRFTISRDNSKNTLYLQMNSLRAEDTAVYYCARGGSMVRGDYYYGMDVWGQGTTVTVSS

SEQ ID NO: 21 - protein, 107 aa, Artificial Sequence
  source: /note="Description of Artificial Sequence: Synthetic polypeptide"
AIQLTQSPSSLSASVGDRVTITCRASQGISSALAWYQQKPGKAPKLLIYDASSLESGVPSRFSGSGSGTDFTLTISSLQPEDFATYYCQQFNSYPYTFGQGTKLEIK

SEQ ID NO: 22 - protein, 5 aa, Artificial Sequence
  source: /note="Description of Artificial Sequence: Synthetic peptide"
TYWMH

SEQ ID NO: 23 - DNA, 66 bp, Artificial Sequence
  source: /note="Description of Artificial Sequence: Synthetic oligonucleotide"
ggaagcggagctactaacttcagcctgctgaagcaggctggagacgtggaggagaaccctggacct

SEQ ID NO: 24 - protein, 22 aa, Artificial Sequence
  source: /note="Description of Artificial Sequence: Synthetic peptide"
GSGATNFSLLKQAGDVEENPGP

SEQ ID NO: 25 - DNA, 1395 bp, Artificial Sequence
  source: /note="Description of Artificial Sequence: Synthetic polynucleotide"
gacatccagatgacacagactacatcctccctgtctgcctctctgggagacagagtcaccatcagttgcagggcaagtcaggacattagtaaatatttaaattggtatcagcagaaaccagatggaactgttaaactcctgatctaccatacatcaagattacactcaggagtcccatcaaggttcagtggcagtgggtctggaacagattattctctcaccattagcaacctggagcaagaagatattgccacttacttttgccaacagggtaatacgcttccgtacacgttcggaggggggaccaagctggagatcacaggtggcggtggctcgggcggtggtgggtcgggtggcggcggatctgaggtgaaactgcaggagtcaggacctggcctggtggcgccctcacagagcctgtccgtcacatgcactgtctcaggggtctcattacccgactatggtgtaagctggattcgccagcctccacgaaagggtctggagtggctgggagtaatatggggtagtgaaaccacatactataattcagctctcaaatccagactgaccatcatcaaggacaactccaagagccaagttttcttaaaaatgaacagtctgcaaactgatgacacagccatttactactgtgccaaacattattactacggtggtagctatgctatggactactggggccaaggaacctcagtcaccgtctcctcaaccacgacgccagcgccgcgaccaccaacaccggcgcccaccatcgcgtcgcagcccctgtccctgcgcccagaggcgtgccggccagcggcggggggcgcagtgcacacgagggggctggacttcgcctgtgatatctacatctgggcgcccttggccgggacttgtggggtccttctcctgtcactggttatcaccctttactgcaaacggggcagaaagaaactcctgtatatattcaaacaaccatttatgagaccagtacaaactactcaagaggaagatggctgtagctgccgatttccagaagaagaagaaggaggatgtgaactgagagtgaagttcagcaggagcgcagacgcccccgcgtacaagcagggccagaaccagctctataacgagctcaatctaggacgaagagaggagtacgatgttttggacaagagacgtggccgggaccctgagatggggggaaagccgagaaggaagaaccctcaggaaggcctgtacaatgaactgcagaaagataagatggcggaggcctacagtgagattgggatgaaaggcgagcgccggaggggcaaggggcacgatggcctttaccagggtctcagtacagccaccaaggacacctacgacgcccttcacatgcaggccctgccccctcgc

SEQ ID NO: 26 - protein, 465 aa, Artificial Sequence
  source: /note="Description of Artificial Sequence: Synthetic polypeptide"
DIQMTQTTSSLSASLGDRVTISCRASQDISKYLNWYQQKPDGTVKLLIYHTSRLHSGVPSRFSGSGSGTDYSLTISNLEQEDIATYFCQQGNTLPYTFGGGTKLEITGGGGSGGGGSGGGGSEVKLQESGPGLVAPSQSLSVTCTVSGVSLPDYGVSWIRQPPRKGLEWLGVIWGSETTYYNSALKSRLTIIKDNSKSQVFLKMNSLQTDDTAIYYCAKHYYYGGSYAMDYWGQGTSVTVSSTTTPAPRPPTPAPTIASQPLSLRPEACRPAAGGAVHTRGLDFACDIYIWAPLAGTCGVLLLSLVITLYCKRGRKKLLYIFKQPFMRPVQTTQEEDGCSCRFPEEEEGGCELRVKFSRSADAPAYKQGQNQLYNELNLGRREEYDVLDKRRGRDPEMGGKPRRKNPQEGLYNELQKDKMAEAYSEIGMKGERRRGKGHDGLYQGLSTATKDTYDALHMQALPPR

SEQ ID NO: 27 - protein, 117 aa, Artificial Sequence
  source: /note="Description of Artificial Sequence: Synthetic polypeptide"
EVQLVQSGAEVKKPGESLRISCKGSGYTFTTYWMHWVRQATGQGLEWMGNIYPGTGGSNFDEKFKNRVTITADKSTSTAYMELSSLRSEDTAVYYCTRWTTGTGAYWGQGTTVTVSS

SEQ ID NO: 28 - DNA, 351 bp, Artificial Sequence
  source: /note="Description of Artificial Sequence: Synthetic polynucleotide"
gaggtgcagctggtgcagtcaggcgccgaagtgaagaagcccggcgagtcactgagaattagctgtaaaggttcaggctacaccttcactacctactggatgcactgggtccgccaggctaccggtcaaggcctcgagtggatgggtaatatctaccccggcaccggcggctctaacttcgacgagaagtttaagaatagagtgactatcaccgccgataagtctactagcaccgcctatatggaactgtctagcctgagatcagaggacaccgccgtctactactgcactaggtggactaccggcacaggcgcctactggggtcaaggcactaccgtgaccgtgtctagc

SEQ ID NO: 29 - protein, 443 aa, Artificial Sequence
  source: /note="Description of Artificial Sequence: Synthetic polypeptide"
EVQLVQSGAEVKKPGESLRISCKGSGYTFTTYWMHWVRQATGQGLEWMGNIYPGTGGSNFDEKFKNRVTITADKSTSTAYMELSSLRSEDTAVYYCTRWTTGTGAYWGQGTTVTVSSASTKGPSVFPLAPCSRSTSESTAALGCLVKDYFPEPVTVSWNSGALTSGVHTFPAVLQSSGLYSLSSVVTVPSSSLGTKTYTCNVDHKPSNTKVDKRVESKYGPPCPPCPAPEFLGGPSVFLFPPKPKDTLMISRTPEVTCVVVDVSQEDPEVQFNWYVDGVEVHNAKTKPREEQFNSTYRVVSVLTVLHQDWLNGKEYKCKVSNKGLPSSIEKTISKAKGQPREPQVYTLPPSQEEMTKNQVSLTCLVKGFYPSDIAVEWESNGQPENNYKTTPPVLDSDGSFFLYSRLTVDKSRWQEGNVFSCSVMHEALHNHYTQKSLSLSLG

SEQ ID NO: 30 - DNA, 1329 bp, Artificial Sequence
  source: /note="Description of Artificial Sequence: Synthetic polynucleotide"
gaggtgcagctggtgcagtcaggcgccgaagtgaagaagcccggcgagtcactgagaattagctgtaaaggttcaggctacaccttcactacctactggatgcactgggtccgccaggctaccggtcaaggcctcgagtggatgggtaatatctaccccggcaccggcggctctaacttcgacgagaagtttaagaatagagtgactatcaccgccgataagtctactagcaccgcctatatggaactgtctagcctgagatcagaggacaccgccgtctactactgcactaggtggactaccggcacaggcgcctactggggtcaaggcactaccgtgaccgtgtctagcgctagcactaagggcccgtccgtgttccccctggcaccttgtagccggagcactagcgaatccaccgctgccctcggctgcctggtcaaggattacttcccggagcccgtgaccgtgtcctggaacagcggagccctgacctccggagtgcacaccttccccgctgtgctgcagagctccgggctgtactcgctgtcgtcggtggtcacggtgccttcatctagcctgggtaccaagacctacacttgcaacgtggaccacaagccttccaacactaaggtggacaagcgcgtcgaatcgaagtacggcccaccgtgcccgccttgtcccgcgccggagttcctcggcggtccctcggtctttctgttcccaccgaagcccaaggacactttgatgatttcccgcacccctgaagtgacatgcgtggtcgtggacgtgtcacaggaagatccggaggtgcagttcaattggtacgtggatggcgtcgaggtgcacaacgccaaaaccaagccgagggaggagcagttcaactccacttaccgcgtcgtgtccgtgctgacggtgctgcatcaggactggctgaacgggaaggagtacaagtgcaaagtgtccaacaagggacttcctagctcaatcgaaaagaccatctcgaaagccaagggacagccccgggaaccccaagtgtataccctgccaccgagccaggaagaaatgactaagaaccaagtctcattgacttgccttgtgaagggcttctacccatcggatatcgccgtggaatgggagtccaacggccagccggaaaacaactacaagaccacccctccggtgctggactcagacggatccttcttcctctactcgcggctgaccgtggataagagcagatggcaggagggaaatgtgttcagctgttctgtgatgcatgaagccctgcacaaccactacactcagaagtccctgtccctctccctggga

SEQ ID NO: 31 - protein, 17 aa, Artificial Sequence
  source: /note="Description of Artificial Sequence: Synthetic peptide"
KSSQSLLDSGNQKNFLT

SEQ ID NO: 32 - protein, 7 aa, Artificial Sequence
  source: /note="Description of Artificial Sequence: Synthetic peptide"
WASTRES

SEQ ID NO: 33 - protein, 22 aa, Artificial Sequence
  source: /note="Description of Artificial Sequence: Synthetic peptide"
YGRKKRRQRRRLYRSPAMPENL

SEQ ID NO: 34 - protein, 13 aa, Artificial Sequence
  source: /note="Description of Artificial Sequence: Synthetic peptide"
SQSLLDSGNQKNF

SEQ ID NO: 35 - protein, 3 aa, Artificial Sequence
  source: /note="Description of Artificial Sequence: Synthetic peptide"
WAS

SEQ ID NO: 36 - protein, 6 aa, Artificial Sequence
  source: /note="Description of Artificial Sequence: Synthetic peptide"
DYSYPY

SEQ ID NO: 37 - protein, 113 aa, Artificial Sequence
  source: /note="Description of Artificial Sequence: Synthetic polypeptide"
EIVLTQSPATLSLSPGERATLSCKSSQSLLDSGNQKNFLTWYQQKPGKAPKLLIYWASTRESGVPSRFSGSGSGTDFTFTISSLQPEDIATYYCQNDYSYPYTFGQGTKVEIK

SEQ ID NO: 38 - DNA, 339 bp, Artificial Sequence
  source: /note="Description of Artificial Sequence: Synthetic polynucleotide"
gagatcgtcctgactcagtcacccgctaccctgagcctgagccctggcgagcgggctacactgagctgtaaatctagtcagtcactgctggatagcggtaatcagaagaacttcctgacctggtatcagcagaagcccggtaaagcccctaagctgctgatctactgggcctctactagagaatcaggcgtgccctctaggtttagcggtagcggtagtggcaccgacttcaccttcactatctctagcctgcagcccgaggatatcgctacctactactgtcagaacgactatagctacccctacaccttcggtcaaggcactaaggtcgagattaag

SEQ ID NO: 39 - protein, 246 aa, Artificial Sequence
  source: /note="Description of Artificial Sequence: Synthetic polypeptide"
QVQLVESGGGLVQPGRSLRLSCAASGFTFSNYAMSWVRQAPGKGLGWVSGISRSGENTYYADSVKGRFTISRDNSKNTLYLQMNSLRDEDTAVYYCARSPAHYYGGMDVWGQGTTVTVSSASGGGGSGGRASGGGGSDIVLTQSPGTLSLSPGERATLSCRASQSISSSFLAWYQQKPGQAPRLLIYGASRRATGIPDRFSGSGSGTDFTLTISRLEPEDSAVYYCQQYHSSPSWTFGQGTKLEIK

SEQ ID NO: 40 - protein, 244 aa, Artificial Sequence
  source: /note="Description of Artificial Sequence: Synthetic polypeptide"
QVQLVESGGGLVQPGRSLRLSCAASGFTFDDYAMHWVRQAPGKGLEWVSGISWNSGSIGYADSVKGRFTISRDNAKNSLYLQMNSLRAEDTALYYCSVHSFLAYWGQGTLVTVSSASGGGGSGGRASGGGGSDIVMTQTPLSLPVTPGEPASISCRSSQSLLHSNGYNYLDWYLQKPGQSPQLLIYLGSNRASGVPDRFSGSGSGTDFTLKISRVEAEDVGVYYCMQALQTPYTFGQGTKVEIK

SEQ ID NO: 41 - protein, 243 aa, Artificial Sequence
  source: /note="Description of Artificial Sequence: Synthetic polypeptide"
EVQLLESGGGLVQPGGSLRLSCAVSGFALSNHGMSWVRRAPGKGLEWVSGIVYSGSTYYAASVKGRFTISRDNSRNTLYLQMNSLRPEDTAIYYCSAHGGESDVWGQGTTVTVSSASGGGGSGGRASGGGGSDIVMTQTPLSLSVTPGQPASISCKSSQSLLRNDGKTPLYWYLQKAGQPPQLLIYEVSNRFSGVPDRFSGSGSGTDFTLKISRVEAEDVGAYYCMQNIQFPSFGGGTKLEIK

SEQ ID NO: 42 - protein, 249 aa, Artificial Sequence
  source: /note="Description of Artificial Sequence: Synthetic polypeptide"
QVQLVQSGAEVRKTGASVKVSCKASGYIFDNFGINWVRQAPGQGLEWMGWINPKNNNTNYAQKFQGRVTITADESTNTAYMEVSSLRSEDTAVYYCARGPYYYQSYMDVWGQGTMVTVSSASGGGGSGGRASGGGGSDIVMTQTPLSLPVTPGEPASISCRSSQSLLHSNGYNYLNWYLQKPGQSPQLLIYLGSKRASGVPDRFSGSGSGTDFTLHITRVGAEDVGVYYCMQALQTPYTFGQGTKLEIK

SEQ ID NO: 43 - protein, 246 aa, Artificial Sequence
  source: /note="Description of Artificial Sequence: Synthetic polypeptide"
QVQLQESGGGLVQPGGSLRLSCAASGFTFSSDAMTWVRQAPGKGLEWVSVISGSGGTTYYADSVKGRFTISRDNSKNTLYLQMNSLRAEDTAVYYCAKLDSSGYYYARGPRYWGQGTLVTVSSASGGGGSGGRASGGGGSDIQLTQSPSSLSASVGDRVTITCRASQSISSYLNWYQQKPGKAPKLLIYGASTLASGVPARFSGSGSGTHFTLTINSLQSEDSATYYCQQSYKRASFGQGTKVEIK

SEQ ID NO: 44 - protein, 247 aa, Artificial Sequence
  source: /note="Description of Artificial Sequence: Synthetic polypeptide"
QVQLVQSGAEVKKPGASVKVSCKASGYTFSNYGITWVRQAPGQGLEWMGWISAYNGNTNYAQKFQGRVTMTRNTSISTAYMELSSLRSEDTAVYYCARGPYYYYMDVWGKGTMVTVSSASGGGGSGGRASGGGGSEIVMTQSPLSLPVTPGEPASISCRSSQSLLYSNGYNYVDWYLQKPGQSPQLLIYLGSNRASGVPDRFSGSGSGTDFKLQISRVEAEDVGIYYCMQGRQFPYSFGQGTKVEIK

SEQ ID NO: 45 - protein, 238 aa, Artificial Sequence
  source: /note="Description of Artificial Sequence: Synthetic polypeptide"
EVQLLETGGGLVQPGGSLRLSCAVSGFALSNHGMSWVRRAPGKGLEWVSGIVYSGSTYYAASVKGRFTISRDNSRNTLYLQMNSLRPEDTAIYYCSAHGGESDVWGQGTTVTVSSASGGGGSGGRASGGGGSEIVLTQSPATLSVSPGESATLSCRASQSVSSNLAWYQQKPGQAPRLLIYGASTRASGIPDRFSGSGSGTDFTLTISSLQAEDVAVYYCQQYGSSLTFGGGTKVEIK

SEQ ID NO: 46 - protein, 239 aa, Artificial Sequence
  source: /note="Description of Artificial Sequence: Synthetic polypeptide"
EVQLVETGGGLVQPGGSLRLSCAVSGFALSNHGMSWVRRAPGKGLEWVSGIVYSGSTYYAASVKGRFTISRDNSRNTLYLQMNSLRPEDTAIYYCSAHGGESDVWGQGTTVTVSSASGGGGSGGRASGGGGSEIVMTQSPATLSVSPGERATLSCRASQSVSSKLAWYQQKPGQAPRLLMYGASIRATGIPDRFSGSGSGTEFTLTISSLEPEDFAVYYCQQYGSSSWTFGQGTKVEIK

SEQ ID NO: 47 - protein, 241 aa, Artificial Sequence
  source: /note="Description of Artificial Sequence: Synthetic polypeptide"
EVQLVETGGGVVQPGGSLRLSCAVSGFALSNHGMSWVRRAPGKGLEWVSGIVYSGSTYYAASVKGRFTISRDNSRNTLYLQMNSLRPEDTAIYYCSAHGGESDVWGQGTTVTVSSASGGGGSGGRASGGGGSEIVLTQSPGTLSLSPGERATLSCRASQSVGSTNLAWYQQKPGQAPRLLIYDASNRATGIPDRFSGGGSGTDFTLTISRLEPEDFAVYYCQQYGSSPPWTFGQGTKVEIK

SEQ ID NO: 48 - protein, 239 aa, Artificial Sequence
  source: /note="Description of Artificial Sequence: Synthetic polypeptide"
QVQLVESGGGLVKPGGSLRLSCAASGFTFSDYYMSWIRQAPGKGLEWVSYISSSGSTIYYADSVKGRFTISRDNAKNSLYLQMNSLRAEDTAVYYCARESGDGMDVWGQGTTVTVSSASGGGGSGGRASGGGGSDIQMTQSPSSLSASVGDRVTITCRASQSISSYLNWYQQKPGKAPKLLIYAASSLQSGVPSRFSGSGSGTDFTLTISSLQPEDFATYYCQQSYTLAFGQGTKVDIK

SEQ ID NO: 49 - protein, 239 aa, Artificial Sequence
  source: /note="Description of Artificial Sequence: Synthetic polypeptide"
EVQLVESGGGLVQPGGSLRLSCAVSGFALSNHGMSWVRRAPGKGLEWVSGIVYSGSTYYAASVKGRFTISRDNSRNTLYLQMNSLRPEDTAIYYCSAHGGESDVWGQGTTVTVSSASGGGGSGGRASGGGGSDIQLTQSPSSLSASVGDRVTITCRASQSISSYLNWYQQKPGKAPKLLIYAASSLQSGVPSRFSGSGSGTDFTLTISSLQPEDFATYYCQQSYSTPYTFGQGTKVEIK

SEQ ID NO: 50 - protein, 246 aa, Artificial Sequence
  source: /note="Description of Artificial Sequence: Synthetic polypeptide"
QVQLVQSGGGLVKPGGSLRLSCAASGFTFSDYYMSWIRQAPGKGLEWVSYISSSGNTIYYADSVKGRFTISRDNAKNSLYLQMNSLRAEDTAVYYCARSTMVREDYWGQGTLVTVSSASGGGGSGGRASGGGGSDIVLTQSPLSLPVTLGQPASISCKSSESLVHNSGKTYLNWFHQRPGQSPRRLIYEVSNRDSGVPDRFTGSGSGTDFTLKISRVEAEDVGVYYCMQGTHWPGTFGQGTKLEIK

SEQ ID NO: 51 - protein, 239 aa, Artificial Sequence
  source: /note="Description of Artificial Sequence: Synthetic polypeptide"
QVQLVESGGGLVQPGGSLRLSCAVSGFALSNHGMSWVRRAPGKGLEWVSGIVYSGSTYYAASVKGRFTISRDNSRNTLYLQMNSLRPEDTAIYYCSAHGGESDVWGQGTTVTVSSASGGGGSGGRASGGGGSDIRLTQSPSPLSASVGDRVTITCQASEDINKFLNWYHQTPGKAPKLLIYDASTLQTGVPSRFSGSGSGTDFTLTINSLQPEDIGTYYCQQYESLPLTFGGGTKVEIK

SEQ ID NO: 52 - protein, 240 aa, Artificial Sequence
  source: /note="Description of Artificial Sequence: Synthetic polypeptide"
EVQLVETGGGLVQPGGSLRLSCAVSGFALSNHGMSWVRRAPGKGLEWVSGIVYSGSTYYAASVKGRFTISRDNSRNTLYLQMNSLRPEDTAIYYCSAHGGESDVWGQGTTVTVSSASGGGGSGGRASGGGGSETTLTQSPATLSVSPGERATLSCRASQSVGSNLAWYQQKPGQGPRLLIYGASTRATGIPARFSGSGSGTEFTLTISSLQPEDFAVYYCQQYNDWLPVTFGQGTKVEIK

SEQ ID NO: 53 - protein, 241 aa, Artificial Sequence
  source: /note="Description of Artificial Sequence: Synthetic polypeptide"
EVQLVESGGGLVQPGGSLRLSCAVSGFALSNHGMSWVRRAPGKGLEWVSGIVYSGSTYYAASVKGRFTISRDNSRNTLYLQMNSLRPEDTAIYYCSAHGGESDVWGQGTTVTVSSASGGGGSGGRASGGGGSEIVLTQSPGTLSLSPGERATLSCRASQSIGSSSLAWYQQKPGQAPRLLMYGASSRASGIPDRFSGSGSGTDFTLTISRLEPEDFAVYYCQQYAGSPPFTFGQGTKVEIK

SEQ ID NO: 54 - DNA, 738 bp, Artificial Sequence
  source: /note="Description of Artificial Sequence: Synthetic polynucleotide"
caagtgcaactcgtggaatctggtggaggactcgtgcaacccggaagatcgcttagactgtcgtgtgccgccagcgggttcactttctcgaactacgcgatgtcctgggtccgccaggcacccggaaagggactcggttgggtgtccggcatttcccggtccggcgaaaatacctactacgccgactccgtgaagggccgcttcaccatctcaagggacaacagcaaaaacaccctgtacttgcaaatgaactccctgcgggatgaagatacagccgtgtactattgcgcccggtcgcctgcccattactacggcggaatggacgtctggggacagggaaccactgtgactgtcagcagcgcgtcgggtggcggcggctcagggggtcgggcctccggggggggagggtccgacatcgtgctgacccagtccccgggaaccctgagcctgagcccgggagagcgcgcgaccctgtcatgccgggcatcccagagcattagctcctcctttctcgcctggtatcagcagaagcccggacaggccccgaggctgctgatctacggcgctagcagaagggctaccggaatcccagaccggttctccggctccggttccgggaccgatttcacccttactatctcgcgcctggaacctgaggactccgccgtctactactgccagcagtaccactcatccccgtcgtggacgttcggacagggcaccaagctggagattaag

SEQ ID NO: 55 - DNA, 732 bp, Artificial Sequence
  source: /note="Description of Artificial Sequence: Synthetic polynucleotide"
caagtgcaactcgtcgaatccggtggaggtctggtccaacctggtagaagcctgagactgtcgtgtgcggccagcggattcacctttgatgactatgctatgcactgggtgcggcaggccccaggaaagggcctggaatgggtgtcgggaattagctggaactccgggtccattggctacgccgactccgtgaagggccgcttcaccatctcccgcgacaacgcaaagaactccctgtacttgcaaatgaactcgctcagggctgaggataccgcgctgtactactgctccgtgcattccttcctggcctactggggacagggaactctggtcaccgtgtcgagcgcctccggcggcgggggctcgggtggacgggcctcgggcggaggggggtccgacatcgtgatgacccagaccccgctgagcttgcccgtgactcccggagagcctgcatccatctcctgccggtcatcccagtcccttctccactccaacggatacaactacctcgactggtacctccagaagccgggacagagccctcagcttctgatctacctggggtcaaatagagcctcaggagtgccggatcggttcagcggatctggttcgggaactgatttcactctgaagatttcccgcgtggaagccgaggacgtgggcgtctactactgtatgcaggcgctgcagaccccctataccttcggccaagggacgaaagtggagatcaag

SEQ ID NO: 56 - DNA, 729 bp, Artificial Sequence
  source: /note="Description of Artificial Sequence: Synthetic polynucleotide"
gaagtgcaattgttggaatctggaggaggacttgtgcagcctggaggatcactgagactttcgtgtgcggtgtcaggcttcgccctgagcaaccacggcatgagctgggtgcggagagccccggggaagggtctggaatgggtgtccgggatcgtctactccggttcaacttactacgccgcaagcgtgaagggtcgcttcaccatttcccgcgataactcccggaacaccctgtacctccaaatgaactccctgcggcccgaggacaccgccatctactactgttccgcgcatggaggagagtccgatgtctggggacagggcactaccgtgaccgtgtcgagcgcctcggggggaggaggctccggcggtcgcgcctccggggggggtggcagcgacattgtgatgacgcagactccactctcgctgtccgtgaccccgggacagcccgcgtccatctcgtgcaagagctcccagagcctgctgaggaacgacggaaagactcctctgtattggtacctccagaaggctggacagcccccgcaactgctcatctacgaagtgtcaaatcgcttctccggggtgccggatcggttttccggctcgggatcgggcaccgacttcaccctgaaaatctccagggtcgaggccgaggacgtgggagcctactactgcatgcaaaacatccagttcccttccttcggcggcggcacaaagctggagattaag

SEQ ID NO: 57 - DNA, 747 bp, Artificial Sequence
  source: /note="Description of Artificial Sequence: Synthetic polynucleotide"
caagtccaactcgtccagtccggcgcagaagtcagaaaaaccggtgctagcgtgaaagtgtcctgcaaggcctccggctacattttcgataacttcggaatcaactgggtcagacaggccccgggccaggggctggaatggatgggatggatcaaccccaagaacaacaacaccaactacgcacagaagttccagggccgcgtgactatcaccgccgatgaatcgaccaataccgcctacatggaggtgtcctccctgcggtcggaggacactgccgtgtattactgcgcgaggggcccatactactaccaaagctacatggacgtctggggacagggaaccatggtgaccgtgtcatccgcctccggtggtggaggctccggggggcgggcttcaggaggcggaggaagcgatattgtgatgacccagactccgcttagcctgcccgtgactcctggagaaccggcctccatttcctgccggtcctcgcaatcactcctgcattccaacggttacaactacctgaattggtacctccagaagcctggccagtcgccccagttgctgatctatctgggctcgaagcgcgcctccggggtgcctgaccggtttagcggatctgggagcggcacggacttcactctccacatcacccgcgtgggagcggaggacgtgggagtgtactactgtatgcaggcgctgcagactccgtacacattcggacagggcaccaagctggagatcaag

SEQ ID NO: 58 - DNA, 738 bp, Artificial Sequence
  source: /note="Description of Artificial Sequence: Synthetic polynucleotide"
caagtgcaacttcaagaatcaggcggaggactcgtgcagcccggaggatcattgcggctctcgtgcgccgcctcgggcttcaccttctcgagcgacgccatgacctgggtccgccaggccccggggaaggggctggaatgggtgtctgtgatttccggctccgggggaactacgtactacgccgattccgtgaaaggtcgcttcactatctcccgggacaacagcaagaacaccctttatctgcaaatgaattccctccgcgccgaggacaccgccgtgtactactgcgccaagctggactcctcgggctactactatgcccggggtccgagatactggggacagggaaccctcgtgaccgtgtcctccgcgtccggcggaggagggtcgggagggcgggcctccggcggcggcggttcggacatccagctgacccagtccccatcctcactgagcgcaagcgtgggcgacagagtcaccattacatgcagggcgtcccagagcatcagctcctacctgaactggtaccaacagaagcctggaaaggctcctaagctgttgatctacggggcttcgaccctggcatccggggtgcccgcgaggtttagcggaagcggtagcggcactcacttcactctgaccattaacagcctccagtccgaggattcagccacttactactgtcagcagtcctacaagcgggccagcttcggacagggcactaaggtcgagatcaag

SEQ ID NO: 59 - DNA, 741 bp, Artificial Sequence
  source: /note="Description of Artificial Sequence: Synthetic polynucleotide"
caagtccaactggtccagagcggtgcagaagtgaagaagcccggagcgagcgtgaaagtgtcctgcaaggcttccgggtacaccttctccaactacggcatcacttgggtgcgccaggccccgggacagggcctggaatggatggggtggatttccgcgtacaacggcaatacgaactacgctcagaagttccagggtagagtgaccatgactaggaacacctccatttccaccgcctacatggaactgtcctccctgcggagcgaggacaccgccgtgtactattgcgcccggggaccatactactactacatggatgtctgggggaaggggactatggtcaccgtgtcatccgcctcgggaggcggcggatcaggaggacgcgcctctggtggtggaggatcggagatcgtgatgacccagagccctctctccttgcccgtgactcctggggagcccgcatccatttcatgccggagctcccagtcacttctctactccaacggctataactacgtggattggtacctccaaaagccgggccagagcccgcagctgctgatctacctgggctcgaacagggccagcggagtgcctgaccggttctccgggtcgggaagcgggaccgacttcaagctgcaaatctcgagagtggaggccgaggacgtgggaatctactactgtatgcagggccgccagtttccgtactcgttcggacagggcaccaaagtggaaatcaag

SEQ ID NO: 60 - DNA, 714 bp, Artificial Sequence
  source: /note="Description of Artificial Sequence: Synthetic polynucleotide"
gaagtgcaattgctcgaaactggaggaggtctggtgcaacctggaggatcacttcgcctgtcctgcgccgtgtcgggctttgccctgtccaaccatggaatgagctgggtccgccgcgcgccggggaagggcctcgaatgggtgtccggcatcgtctactccggctccacctactacgccgcgtccgtgaagggccggttcacgatttcacgggacaactcgcggaacaccctgtacctccaaatgaattcccttcggccggaggatactgccatctactactgctccgcccacggtggcgaatccgacgtctggggccagggaaccaccgtgaccgtgtccagcgcgtccgggggaggaggaagcgggggtagagcatcgggtggaggcggatcagagatcgtgctgacccagtcccccgccaccttgagcgtgtcaccaggagagtccgccaccctgtcatgccgcgccagccagtccgtgtcctccaacctggcttggtaccagcagaagccggggcaggcccctagactcctgatctatggggcgtcgacccgggcatctggaattcccgataggttcagcggatcgggctcgggcactgacttcactctgaccatctcctcgctgcaagccgaggacgtggctgtgtactactgtcagcagtacggaagctccctgactttcggtggcgggaccaaagtcgagattaag

SEQ ID NO: 61 - DNA, 717 bp, Artificial Sequence
  source: /note="Description of Artificial Sequence: Synthetic polynucleotide"
gaagtgcaattggtggaaactggaggaggacttgtgcaacctggaggatcattgagactgagctgcgcagtgtcgggattcgccctgagcaaccatggaatgtcctgggtcagaagggcccctggaaaaggcctcgaatgggtgtcagggatcgtgtactccggttccacttactacgccgcctccgtgaaggggcgcttcactatctcacgggataactcccgcaataccctgtacctccaaatgaacagcctgcggccggaggataccgccatctactactgttccgcccacggtggagagtctgacgtctggggccagggaactaccgtgaccgtgtcctccgcgtccggcggtggagggagcggcggccgcgccagcggcggcggaggctccgagatcgtgatgacccagagccccgctactctgtcggtgtcgcccggagaaagggcgaccctgtcctgccgggcgtcgcagtccgtgagcagcaagctggcttggtaccagcagaagccgggccaggcaccacgcctgcttatgtacggtgcctccattcgggccaccggaatcccggaccggttctcggggtcggggtccggtaccgagttcacactgaccatttcctcgctcgagcccgaggactttgccgtctattactgccagcagtacggctcctcctcatggacgttcggccaggggaccaaggtcgaaatcaag

SEQ ID NO: 62 - DNA, 723 bp, Artificial Sequence
  source: /note="Description of Artificial Sequence: Synthetic polynucleotide"
gaagtgcaattggtggagactggaggaggagtggtgcaacctggaggaagcctgagactgtcatgcgcggtgtcgggcttcgccctctccaaccacggaatgtcctgggtccgccgggcccctgggaaaggacttgaatgggtgtccggcatcgtgtactcgggttccacctactacgcggcctcagtgaagggccggtttactattagccgcgacaactccagaaacacactgtacctccaaatgaactcgctgcggccggaagataccgctatctactactgctccgcccatgggggagagtcggacgtctggggacagggcaccactgtcactgtgtccagcgcttccggcggtggtggaagcgggggacgggcctcaggaggcggtggcagcgagattgtgctgacccagtcccccgggaccctgagcctgtccccgggagaaagggccaccctctcctgtcgggcatcccagtccgtggggtctactaaccttgcatggtaccagcagaagcccggccaggcccctcgcctgctgatctacgacgcgtccaatagagccaccggcatcccggatcgcttcagcggaggcggatcgggcaccgacttcaccctcaccatttcaaggctggaaccggaggacttcgccgtgtactactgccagcagtatggttcgtccccaccctggacgttcggccaggggactaaggtcgagatcaag

SEQ ID NO: 63 - DNA, 717 bp, Artificial Sequence
  source: /note="Description of Artificial Sequence: Synthetic polynucleotide"
caagtgcaactcgtggaatctggtggaggactcgtgaaacctggaggatcattgagactgtcatgcgcggcctcgggattcacgttctccgattactacatgagctggattcgccaggctccggggaagggactggaatgggtgtcctacatttcctcatccggctccaccatctactacgcggactccgtgaaggggagattcaccattagccgcgataacgccaagaacagcctgtaccttcagatgaactccctgcgggctgaagatactgccgtctactactgcgcaagggagagcggagatgggatggacgtctggggacagggtaccactgtgaccgtgtcgtcggcctccggcggagggggttcgggtggaagggccagcggcggcggaggcagcgacatccagatgacccagtccccctcatcgctgtccgcctccgtgggcgaccgcgtcaccatcacatgccgggcctcacagtcgatctcctcctacctcaattggtatcagcagaagcccggaaaggcccctaagcttctgatctacgcagcgtcctccctgcaatccggggtcccatctcggttctccggctcgggcagcggtaccgacttcactctgaccatctcgagcctgcagccggaggacttcgccacttactactgtcagcaaagctacaccctcgcgtttggccagggcaccaaagtggacatcaag

SEQ ID NO: 64 - DNA, 717 bp, Artificial Sequence
  source: /note="Description of Artificial Sequence: Synthetic polynucleotide"
gaagtgcaattggtggaatcagggggaggacttgtgcagcctggaggatcgctgagactgtcatgtgccgtgtccggctttgccctgtccaaccacgggatgtcctgggtccgccgcgcgcctggaaagggcctcgaatgggtgtcgggtattgtgtacagcggtagcacctactatgccgcatccgtgaaggggagattcaccatcagccgggacaactccaggaacactctgtacctccaaatgaattcgctgaggccagaggacactgccatctactactgctccgcgcatggcggagagtccgacgtctggggacaggggaccaccgtgaccgtgtctagcgcgtccggcggaggcggcagcgggggtcgggcatcagggggcggcggatcggacatccagctcacccagtccccgagctcgctgtccgcctccgtgggagatcgggtcaccatcacgtgccgcgccagccagtcgatttcctcctacctgaactggtaccaacagaagcccggaaaagccccgaagcttctcatctacgccgcctcgagcctgcagtcaggagtgccctcacggttctccggctccggttccggtactgatttcaccctgaccatttcctccctgcaaccggaggacttcgctacttactactgccagcagtcgtactccaccccctacactttcggacaaggcaccaaggtcgaaatcaag

SEQ ID NO: 65 - DNA, 738 bp, Artificial Sequence
  source: /note="Description of Artificial Sequence: Synthetic polynucleotide"
caagtgcaactggtgcaaagcggaggaggattggtcaaacccggaggaagcctgagactgtcatgcgcggcctctggattcaccttctccgattactacatgtcatggatcagacaggccccggggaagggcctcgaatgggtgtcctacatctcgtcctccgggaacaccatctactacgccgacagcgtgaagggccgctttaccatttcccgcgacaacgcaaagaactcgctgtaccttcagatgaattccctgcgggctgaagataccgcggtgtactattgcgcccggtccactatggtccgggaggactactggggacagggcacactcgtgaccgtgtccagcgcgagcgggggtggaggcagcggtggacgcgcctccggcggcggcggttcagacatcgtgctgactcagtcgcccctgtcgctgccggtcaccctgggccaaccggcctcaattagctgcaagtcctcggagagcctggtgcacaactcaggaaagacttacctgaactggttccatcagcggcctggacagtccccacggaggctcatctatgaagtgtccaacagggattcgggggtgcccgaccgcttcactggctccgggtccggcaccgacttcaccttgaaaatctccagagtggaagccgaggacgtgggcgtgtactactgtatgcagggtacccactggcctggaacctttggacaaggaactaagctcgagattaag

SEQ ID NO: 66 - DNA, 717 bp, Artificial Sequence
  source: /note="Description of Artificial Sequence: Synthetic polynucleotide"
caagtgcaactcgtggaatctggtggaggactcgtgcaacccggtggaagccttaggctgtcgtgcgccgtcagcgggtttgctctgagcaaccatggaatgtcctgggtccgccgggcaccgggaaaagggctggaatgggtgtccggcatcgtgtacagcgggtcaacctattacgccgcgtccgtgaagggcagattcactatctcaagagacaacagccggaacaccctgtacttgcaaatgaattccctgcgccccgaggacaccgccatctactactgctccgcccacggaggagagtcggacgtgtggggccagggaacgactgtgactgtgtccagcgcatcaggagggggtggttcgggcggccgggcctcggggggaggaggttccgacattcggctgacccagtccccgtccccactgtcggcctccgtcggcgaccgcgtgaccatcacttgtcaggcgtccgaggacattaacaagttcctgaactggtaccaccagacccctggaaaggcccccaagctgctgatctacgatgcctcgacccttcaaactggagtgcctagccggttctccgggtccggctccggcactgatttcactctgaccatcaactcattgcagccggaagatatcgggacctactattgccagcagtacgaatccctcccgctcacattcggcgggggaaccaaggtcgagattaag

SEQ ID NO: 67 - DNA, 720 bp, Artificial Sequence
  source: /note="Description of Artificial Sequence: Synthetic polynucleotide"
gaagtgcaattggtggaaactggaggaggacttgtgcaacctggaggatcattgcggctctcatgcgctgtctccggcttcgccctgtcaaatcacgggatgtcgtgggtcagacgggccccgggaaagggtctggaatgggtgtcggggattgtgtacagcggctccacctactacgccgcttcggtcaagggccgcttcactatttcacgggacaacagccgcaacaccctctatctgcaaatgaactctctccgcccggaggataccgccatctactactgctccgcacacggcggcgaatccgacgtgtggggacagggaaccactgtcaccgtgtcgtccgcatccggtggcggaggatcgggtggccgggcctccgggggcggcggcagcgagactaccctgacccagtcccctgccactctgtccgtgagcccgggagagagagccacccttagctgccgggccagccagagcgtgggctccaacctggcctggtaccagcagaagccaggacagggtcccaggctgctgatctacggagcctccactcgcgcgaccggcatccccgcgaggttctccgggtcgggttccgggaccgagttcaccctgaccatctcctccctccaaccggaggacttcgcggtgtactactgtcagcagtacaacgattggctgcccgtgacatttggacaggggacgaaggtggaaatcaaa

SEQ ID NO: 68 - DNA, 723 bp, Artificial Sequence
  source: /note="Description of Artificial Sequence: Synthetic polynucleotide"
gaagtgcaattggtggaatctggtggaggacttgtgcaacctggaggatcactgagactgtcatgcgcggtgtccggttttgccctgagcaatcatgggatgtcgtgggtccggcgcgcccccggaaagggtctggaatgggtgtcgggtatcgtctactccgggagcacttactacgccgcgagcgtgaagggccgcttcaccatttcccgcgataactcccgcaacaccctgtacttgcaaatgaactcgctccggcctgaggacactgccatctactactgctccgcacacggaggagaatccgacgtgtggggccagggaactaccgtgaccgtcagcagcgcctccggcggcgggggctcaggcggacgggctagcggcggcggtggctccgagatcgtgctgacccagtcgcctggcactctctcgctgagccccggggaaagggcaaccctgtcctgtcgggccagccagtccattggatcatcctccctcgcctggtatcagcagaaaccgggacaggctccgcggctgcttatgtatggggccagctcaagagcctccggcattcccgaccggttctccgggtccggttccggcaccgatttcaccctgactatctcgaggctggagccagaggacttcgccgtgtactactgccagcagtacgcggggtccccgccgttcacgttcggacagggaaccaaggtcgagatcaag

SEQ ID NO: 69 - protein, 120 aa, Artificial Sequence
  source: /note="Description of Artificial Sequence: Synthetic polypeptide"
QVQLVESGGGLVQPGRSLRLSCAASGFTFSNYAMSWVRQAPGKGLGWVSGISRSGENTYYADSVKGRFTISRDNSKNTLYLQMNSLRDEDTAVYYCARSPAHYYGGMDVWGQGTTVTVSS

SEQ ID NO: 70 - protein, 115 aa, Artificial Sequence
  source: /note="Description of Artificial Sequence: Synthetic polypeptide"
QVQLVESGGGLVQPGRSLRLSCAASGFTFDDYAMHWVRQAPGKGLEWVSGISWNSGSIGYADSVKGRFTISRDNAKNSLYLQMNSLRAEDTALYYCSVHSFLAYWGQGTLVTVSS

SEQ ID NO: 71 - protein, 115 aa, Artificial Sequence
  source: /note="Description of Artificial Sequence: Synthetic polypeptide"
EVQLLESGGGLVQPGGSLRLSCAVSGFALSNHGMSWVRRAPGKGLEWVSGIVYSGSTYYAASVKGRFTISRDNSRNTLYLQMNSLRPEDTAIYYCSAHGGESDVWGQGTTVTVSS

SEQ ID NO: 72 - protein, 120 aa, Artificial Sequence
  source: /note="Description of Artificial Sequence: Synthetic polypeptide"
QVQLVQSGAEVRKTGASVKVSCKASGYIFDNFGINWVRQAPGQGLEWMGWINPKNNNTNYAQKFQGRVTITADESTNTAYMEVSSLRSEDTAVYYCARGPYYYQSYMDVWGQGTMVTVSS

SEQ ID NO: 73 - protein, 123 aa, Artificial Sequence
  source: /note="Description of Artificial Sequence: Synthetic polypeptide"
QVQLQESGGGLVQPGGSLRLSCAASGFTFSSDAMTWVRQAPGKGLEWVSVISGSGGTTYYADSVKGRFTISRDNSKNTLYLQMNSLRAEDTAVYYCAKLDSSGYYYARGPRYWGQGTLVTVSS

SEQ ID NO: 74 - protein, 118 aa, Artificial Sequence
  source: /note="Description of Artificial Sequence: Synthetic polypeptide"
QVQLVQSGAEVKKPGASVKVSCKASGYTFSNYGITWVRQAPGQGLEWMGWISAYNGNTNYAQKFQGRVTMTRNTSISTAYMELSSLRSEDTAVYYCARGPYYYYMDVWGKGTMVTVSS

SEQ ID NO: 75 - protein, 115 aa, Artificial Sequence
  source: /note="Description of Artificial Sequence: Synthetic polypeptide"
EVQLLETGGGLVQPGGSLRLSCAVSGFALSNHGMSWVRRAPGKGLEWVSGIVYSGSTYYAASVKGRFTISRDNSRNTLYLQMNSLRPEDTAIYYCSAHGGESDVWGQGTTVTVSS

SEQ ID NO: 76 - protein, 115 aa, Artificial Sequence
  source: /note="Description of Artificial Sequence: Synthetic polypeptide"
EVQLVETGGGLVQPGGSLRLSCAVSGFALSNHGMSWVRRAPGKGLEWVSGIVYSGSTYYAASVKGRFTISRDNSRNTLYLQMNSLRPEDTAIYYCSAHGGESDVWGQGTTVTVSS

SEQ ID NO: 77 - protein, 115 aa, Artificial Sequence
  source: /note="Description of Artificial Sequence: Synthetic polypeptide"
EVQLVETGGGVVQPGGSLRLSCAVSGFALSNHGMSWVRRAPGKGLEWVSGIVYSGSTYYAASVKGRFTISRDNSRNTLYLQMNSLRPEDTAIYYCSAHGGESDVWGQGTTVTVSS

SEQ ID NO: 78 - protein, 117 aa, Artificial Sequence
  source: /note="Description of Artificial Sequence: Synthetic polypeptide"
QVQLVESGGGLVKPGGSLRLSCAASGFTFSDYYMSWIRQAPGKGLEWVSYISSSGSTIYYADSVKGRFTISRDNAKNSLYLQMNSLRAEDTAVYYCARESGDGMDVWGQGTTVTVSS

SEQ ID NO: 79 - protein, 115 aa, Artificial Sequence
  source: /note="Description of Artificial Sequence: Synthetic polypeptide"
EVQLVESGGGLVQPGGSLRLSCAVSGFALSNHGMSWVRRAPGKGLEWVSGIVYSGSTYYAASVKGRFTISRDNSRNTLYLQMNSLRPEDTAIYYCSAHGGESDVWGQGTTVTVSS

SEQ ID NO: 80 - protein, 117 aa, Artificial Sequence
  source: /note="Description of Artificial Sequence: Synthetic polypeptide"
QVQLVQSGGGLVKPGGSLRLSCAASGFTFSDYYMSWIRQAPGKGLEWVSYISSSGNTIYYADSVKGRFTISRDNAKNSLYLQMNSLRAEDTAVYYCARSTMVREDYWGQGTLVTVSS

SEQ ID NO: 81 - protein, 115 aa, Artificial Sequence
  source: /note="Description of Artificial Sequence: Synthetic polypeptide"
QVQLVESGGGLVQPGGSLRLSCAVSGFALSNHGMSWVRRAPGKGLEWVSGIVYSGSTYYAASVKGRFTISRDNSRNTLYLQMNSLRPEDTAIYYCSAHGGESDVWGQGTTVTVSS

SEQ ID NO: 82 - protein, 115 aa, Artificial Sequence; identical to SEQ ID NO: 76
  source: /note="Description of Artificial Sequence: Synthetic polypeptide"

SEQ ID NO: 83 - protein, 115 aa, Artificial Sequence; identical to SEQ ID NO: 79
  source: /note="Description of Artificial Sequence: Synthetic polypeptide"

SEQ ID NO: 84 - protein, 109 aa, Artificial Sequence
  source: /note="Description of Artificial Sequence: Synthetic polypeptide"
DIVLTQSPGTLSLSPGERATLSCRASQSISSSFLAWYQQKPGQAPRLLIYGASRRATGIPDRFSGSGSGTDFTLTISRLEPEDSAVYYCQQYHSSPSWTFGQGTKLEIK

SEQ ID NO: 85 - protein, 112 aa, Artificial Sequence
  source: /note="Description of Artificial Sequence: Synthetic polypeptide"
DIVMTQTPLSLPVTPGEPASISCRSSQSLLHSNGYNYLDWYLQKPGQSPQLLIYLGSNRASGVPDRFSGSGSGTDFTLKISRVEAEDVGVYYCMQALQTPYTFGQGTKVEIK

SEQ ID NO: 86 - protein, 111 aa, Artificial Sequence
  source: /note="Description of Artificial Sequence: Synthetic polypeptide"
DIVMTQTPLSLSVTPGQPASISCKSSQSLLRNDGKTPLYWYLQKAGQPPQLLIYEVSNRFSGVPDRFSGSGSGTDFTLKISRVEAEDVGAYYCMQNIQFPSFGGGTKLEIK

SEQ ID NO: 87 - protein, 112 aa, Artificial Sequence
  source: /note="Description of Artificial Sequence: Synthetic polypeptide"
DIVMTQTPLSLPVTPGEPASISCRSSQSLLHSNGYNYLNWYLQKPGQSPQLLIYLGSKRASGVPDRFSGSGSGTDFTLHITRVGAEDVGVYYCMQALQTPYTFGQGTKLEIK

SEQ ID NO: 88 - protein, 106 aa, Artificial Sequence
  source: /note="Description of Artificial Sequence: Synthetic polypeptide"
DIQLTQSPSSLSASVGDRVTITCRASQSISSYLNWYQQKPGKAPKLLIYGASTLASGVPARFSGSGSGTHFTLTINSLQSEDSATYYCQQSYKRASFGQGTKVEIK

SEQ ID NO: 89 - protein, 112 aa, Artificial Sequence
  source: /note="Description of Artificial Sequence: Synthetic polypeptide"
EIVMTQSPLSLPVTPGEPASISCRSSQSLLYSNGYNYVDWYLQKPGQSPQLLIYLGSNRASGVPDRFSGSGSGTDFKLQISRVEAEDVGIYYCMQGRQFPYSFGQGTKVEIK

SEQ ID NO: 90 - protein, 106 aa, Artificial Sequence
  source: /note="Description of Artificial Sequence: Synthetic polypeptide"
EIVLTQSPATLSVSPGESATLSCRASQSVSSNLAWYQQKPGQAPRLLIYGASTRASGIPDRFSGSGSGTDFTLTISSLQAEDVAVYYCQQYGSSLTFGGGTKVEIK

SEQ ID NO: 91 - protein, 107 aa, Artificial Sequence
  source: /note="Description of Artificial Sequence: Synthetic polypeptide"
EIVMTQSPATLSVSPGERATLSCRASQSVSSKLAWYQQKPGQAPRLLMYGASIRATGIPDRFSGSGSGTEFTLTISSLEPEDFAVYYCQQYGSSSWTFGQGTKVEIK

SEQ ID NO: 92 - protein, 109 aa, Artificial Sequence
  source: /note="Description of Artificial Sequence: Synthetic polypeptide"
EIVLTQSPGTLSLSPGERATLSCRASQSVGSTNLAWYQQKPGQAPRLLIYDASNRATGIPDRFSGGGSGTDFTLTISRLEPEDFAVYYCQQYGSSPPWTFGQGTKVEIK

SEQ ID NO: 93 - protein, 105 aa, Artificial Sequence
  source: /note="Description of Artificial Sequence: Synthetic polypeptide"
DIQMTQSPSSLSASVGDRVTITCRASQSISSYLNWYQQKPGKAPKLLIYAASSLQSGVPSRFSGSGSGTDFTLTISSLQPEDFATYYCQQSYTLAFGQGTKVDIK

SEQ ID NO: 94 - protein, 107 aa, Artificial Sequence
  source: /note="Description of Artificial Sequence: Synthetic polypeptide"
DIQLTQSPSSLSASVGDRVTITCRASQSISSYLNWYQQKPGKAPKLLIYAASSLQSGVPSRFSGSGSGTDFTLTISSLQPEDFATYYCQQSYSTPYTFGQGTKVEIK

SEQ ID NO: 95 - protein, 112 aa, Artificial Sequence
  source: /note="Description of Artificial Sequence: Synthetic polypeptide"
DIVLTQSPLSLPVTLGQPASISCKSSESLVHNSGKTYLNWFHQRPGQSPRRLIYEVSNRDSGVPDRFTGSGSGTDFTLKISRVEAEDVGVYYCMQGTHWPGTFGQGTKLEIK

SEQ ID NO: 96 - protein, 107 aa, Artificial Sequence
  source: /note="Description of Artificial Sequence: Synthetic polypeptide"
DIRLTQSPSPLSASVGDRVTITCQASEDINKFLNWYHQTPGKAPKLLIYDASTLQTGVPSRFSGSGSGTDFTLTINSLQPEDIGTYYCQQYESLPLTFGGGTKVEIK

SEQ ID NO: 97 - protein, 108 aa, Artificial Sequence
  source: /note="Description of Artificial Sequence: Synthetic polypeptide"
ETTLTQSPATLSVSPGERATLSCRASQSVGSNLAWYQQKPGQGPRLLIYGASTRATGIPARFSGSGSGTEFTLTISSLQPEDFAVYYCQQYNDWLPVTFGQGTKVEIK

SEQ ID NO: 98 - protein, 109 aa, Artificial Sequence
  source: /note="Description of Artificial Sequence: Synthetic polypeptide"
EIVLTQSPGTLSLSPGERATLSCRASQSIGSSSLAWYQQKPGQAPRLLMYGASSRASGIPDRFSGSGSGTDFTLTISRLEPEDFAVYYCQQYAGSPPFTFGQGTKVEIK

SEQ ID NO: 99 - protein, 490 aa, Artificial Sequence
  source: /note="Description of Artificial Sequence: Synthetic polypeptide"
MALPVTALLLPLALLLHAARPQVQLVESGGGLVQPGRSLRLSCAASGFTFSNYAMSWVRQAPGKGLGWVSGISRSGENTYYADSVKGRFTISRDNSKNTLYLQMNSLRDEDTAVYYCARSPAHYYGGMDVWGQGTTVTVSSASGGGGSGGRASGGGGSDIVLTQSPGTLSLSPGERATLSCRASQSISSSFLAWYQQKPGQAPRLLIYGASRRATGIPDRFSGSGSGTDFTLTISRLEPEDSAVYYCQQYHSSPSWTFGQGTKLEIKTTTPAPRPPTPAPTIASQPLSLRPEACRPAAGGAVHTRGLDFACDIYIWAPLAGTCGVLLLSLVITLYCKRGRKKLLYIFKQPFMRPVQTTQEEDGCSCRFPEEEEGGCELRVKFSRSADAPAYKQGQNQLYNELNLGRREEYDVLDKRRGRDPEMGGKPRRKNPQEGLYNELQKDKMAEAYSEIGMKGERRRGKGHDGLYQGLSTATKDTYDALHMQALPPR

SEQ ID NO: 100 - protein, 488 aa, Artificial Sequence
  source: /note="Description of Artificial Sequence: Synthetic polypeptide"
MALPVTALLLPLALLLHAARPQVQLVESGGGLVQPGRSLRLSCAASGFTFDDYAMHWVRQAPGKGLEWVSGISWNSGSIGYADSVKGRFTISRDNAKNSLYLQMNSLRAEDTALYYCSVHSFLAYWGQGTLVTVSSASGGGGSGGRASGGGGSDIVMTQTPLSLPVTPGEPASISCRSSQSLLHSNGYNYLDWYLQKPGQSPQLLIYLGSNRASGVPDRFSGSGSGTDFTLKISRVEAEDVGVYYCMQALQTPYTFGQGTKVEIKTTTPAPRPPTPAPTIASQPLSLRPEACRPAAGGAVHTRGLDFACDIYIWAPLAGTCGVLLLSLVITLYCKRGRKKLLYIFKQPFMRPVQTTQEEDGCSCRFPEEEEGGCELRVKFSRSADAPAYKQGQNQLYNELNLGRREEYDVLDKRRGRDPEMGGKPRRKNPQEGLYNELQKDKMAEAYSEIGMKGERRRGKGHDGLYQGLSTATKDTYDALHMQALPPR

SEQ ID NO: 101 - protein, 487 aa, Artificial Sequence
  source: /note="Description of Artificial Sequence: Synthetic polypeptide"
MALPVTALLLPLALLLHAARPEVQLLESGGGLVQPGGSLRLSCAVSGFALSNHGMSWVRRAPGKGLEWVSGIVYSGSTYYAASVKGRFTISRDNSRNTLYLQMNSLRPEDTAIYYCSAHGGESDVWGQGTTVTVSSASGGGGSGGRASGGGGSDIVMTQTPLSLSVTPGQPASISCKSSQSLLRNDGKTPLYWYLQKAGQPPQLLIYEVSNRFSGVPDRFSGSGSGTDFTLKISRVEAEDVGAYYCMQNIQFPSFGGGTKLEIKTTTPAPRPPTPAPTIASQPLSLRPEACRPAAGGAVHTRGLDFACDIYIWAPLAGTCGVLLLSLVITLYCKRGRKKLLYIFKQPFMRPVQTTQEEDGCSCRFPEEEEGGCELRVKFSRSADAPAYKQGQNQLYNELNLGRREEYDVLDKRRGRDPEMGGKPRRKNPQEGLYNELQKDKMAEAYSEIGMKGERRRGKGHDGLYQGLSTATKDTYDALHMQALPPR

SEQ ID NO: 102 - protein, 493 aa, Artificial Sequence
  source: /note="Description of Artificial Sequence: Synthetic polypeptide"
MALPVTALLLPLALLLHAARPQVQLVQSGAEVRKTGASVKVSCKASGYIFDNFGINWVRQAPGQGLEWMGWINPKNNNTNYAQKFQGRVTITADESTNTAYMEVSSLRSEDTAVYYCARGPYYYQSYMDVWGQGTMVTVSSASGGGGSGGRASGGGGSDIVMTQTPLSLPVTPGEPASISCRSSQSLLHSNGYNYLNWYLQKPGQSPQLLIYLGSKRASGVPDRFSGSGSGTDFTLHITRVGAEDVGVYYCMQALQTPYTFGQGTKLEIKTTTPAPRPPTPAPTIASQPLSLRPEACRPAAGGAVHTRGLDFACDIYIWAPLAGTCGVLLLSLVITLYCKRGRKKLLYIFKQPFMRPVQTTQEEDGCSCRFPEEEEGGCELRVKFSRSADAPAYKQGQNQLYNELNLGRREEYDVLDKRRGRDPEMGGKPRRKNPQEGLYNELQKDKMAEAYSEIGMKGERRRGKGHDGLYQGLSTATKDTYDALHMQALPPR

SEQ ID NO: 103 - protein, 490 aa, Artificial Sequence
  source: /note="Description of Artificial Sequence: Synthetic polypeptide"
MALPVTALLLPLALLLHAARPQVQLQESGGGLVQPGGSLRLSCAASGFTFSSDAMTWVRQAPGKGLEWVSVISGSGGTTYYADSVKGRFTISRDNSKNTLYLQMNSLRAEDTAVYYCAKLDSSGYYYARGPRYWGQGTLVTVSSASGGGGSGGRASGGGGSDIQLTQSPSSLSASVGDRVTITCRASQSISSYLNWYQQKPGKAPKLLIYGASTLASGVPARFSGSGSGTHFTLTINSLQSEDSATYYCQQSYKRASFGQGTKVEIKTTTPAPRPPTPAPTIASQPLSLRPEACRPAAGGAVHTRGLDFACDIYIWAPLAGTCGVLLLSLVITLYCKRGRKKLLYIFKQPFMRPVQTTQEEDGCSCRFPEEEEGGCELRVKFSRSADAPAYKQGQNQLYNELNLGRREEYDVLDKRRGRDPEMGGKPRRKNPQEGLYNELQKDKMAEAYSEIGMKGERRRGKGHDGLYQGLSTATKDTYDALHMQALPPR

SEQ ID NO: 104 - protein, 491 aa, Artificial Sequence
  source: /note="Description of Artificial Sequence: Synthetic polypeptide"
MALPVTALLLPLALLLHAARPQVQLVQSGAEVKKPGASVKVSCKASGYTFSNYGITWVRQAPGQGLEWMGWISAYNGNTNYAQKFQGRVTMTRNTSISTAYMELSSLRSEDTAVYYCARGPYYYYMDVWGKGTMVTVSSASGGGGSGGRASGGGGSEIVMTQSPLSLPVTPGEPASISCRSSQSLLYSNGYNYVDWYLQKPGQSPQLLIYLGSNRASGVPDRFSGSGSGTDFKLQISRVEAEDVGIYYCMQGRQFPYSFGQGTKVEIKTTTPAPRPPTPAPTIASQPLSLRPEACRPAAGGAVHTRGLDFACDIYIWAPLAGTCGVLLLSLVITLYCKRGRKKLLYIFKQPFMRPVQTTQEEDGCSCRFPEEEEGGCELRVKFSRSADAPAYKQGQNQLYNELNLGRREEYDVLDKRRGRDPEMGGKPRRKNPQEGLYNELQKDKMAEAYSEIGMKGERRRGKGHDGLYQGLSTATKDTYDALHMQALPPR

SEQ ID NO: 105 - protein, 482 aa, Artificial Sequence
  source: /note="Description of Artificial Sequence: Synthetic polypeptide"
MALPVTALLLPLALLLHAARPEVQLLETGGGLVQPGGSLRLSCAVSGFALSNHGMSWVRRAPGKGLEWVSGIVYSGSTYYAASVKGRFTISRDNSRNTLYLQMNSLRPEDTAIYYCSAHGGESDVWGQGTTVTVSSASGGGGSGGRASGGGGSEIVLTQSPATLSVSPGESATLSCRASQSVSSNLAWYQQKPGQAPRLLIYGASTRASGIPDRFSGSGSGTDFTLTISSLQAEDVAVYYCQQYGSSLTFGGGTKVEIKTTTPAPRPPTPAPTIASQPLSLRPEACRPAAGGAVHTRGLDFACDIYIWAPLAGTCGVLLLSLVITLYCKRGRKKLLYIFKQPFMRPVQTTQEEDGCSCRFPEEEEGGCELRVKFSRSADAPAYKQGQNQLYNELNLGRREEYDVLDKRRGRDPEMGGKPRRKNPQEGLYNELQKDKMAEAYSEIGMKGERRRGKGHDGLYQGLSTATKDTYDALHMQALPPR

SEQ ID NO: 106 - protein, 483 aa, Artificial Sequence
  source: /note="Description of Artificial Sequence: Synthetic polypeptide"
MALPVTALLLPLALLLHAARPEVQLVETGGGLVQPGGSLRLSCAVSGFALSNHGMSWVRRAPGKGLEWVSGIVYSGSTYYAASVKGRFTISRDNSRNTLYLQMNSLRPEDTAIYYCSAHGGESDVWGQGTTVTVSSASGGGGSGGRASGGGGSEIVMTQSPATLSVSPGERATLSCRASQSVSSKLAWYQQKPGQAPRLLMYGASIRATGIPDRFSGSGSGTEFTLTISSLEPEDFAVYYCQQYGSSSWTFGQGTKVEIKTTTPAPRPPTPAPTIASQPLSLRPEACRPAAGGAVHTRGLDFACDIYIWAPLAGTCGVLLLSLVITLYCKRGRKKLLYIFKQPFMRPVQTTQEEDGCSCRFPEEEEGGCELRVKFSRSADAPAYKQGQNQLYNELNLGRREEYDVLDKRRGRDPEMGGKPRRKNPQEGLYNELQKDKMAEAYSEIGMKGERRRGKGHDGLYQGLSTATKDTYDALHMQALPPR

SEQ ID NO: 107 - protein, 485 aa, Artificial Sequence
  source: /note="Description of Artificial Sequence: Synthetic polypeptide"
MALPVTALLLPLALLLHAARPEVQLVETGGGVVQPGGSLRLSCAVSGFALSNHGMSWVRRAPGKGLEWVSGIVYSGSTYYAASVKGRFTISRDNSRNTLYLQMNSLRPEDTAIYYCSAHGGESDVWGQGTTVTVSSASGGGGSGGRASGGGGSEIVLTQSPGTLSLSPGERATLSCRASQSVGSTNLAWYQQKPGQAPRLLIYDASNRATGIPDRFSGGGSGTDFTLTISRLEPEDFAVYYCQQYGSSPPWTFGQGTKVEIKTTTPAPRPPTPAPTIASQPLSLRPEACRPAAGGAVHTRGLDFACDIYIWAPLAGTCGVLLLSLVITLYCKRGRKKLLYIFKQPFMRPVQTTQEEDGCSCRFPEEEEGGCELRVKFSRSADAPAYKQGQNQLYNELNLGRREEYDVLDKRRGRDPEMGGKPRRKNPQEGLYNELQKDKMAEAYSEIGMKGERRRGKGHDGLYQGLSTATKDTYDALHMQALPPR

SEQ ID NO: 108 - protein, 483 aa, Artificial Sequence
  source: /note="Description of Artificial Sequence: Synthetic polypeptide"
MALPVTALLLPLALLLHAARPQVQLVESGGGLVKPGGSLRLSCAASGFTFSDYYMSWIRQAPGKGLEWVSYISSSGSTIYYADSVKGRFTISRDNAKNSLYLQMNSLRAEDTAVYYCARESGDGMDVWGQGTTVTVSSASGGGGSGGRASGGGGSDIQMTQSPSSLSASVGDRVTITCRASQSISSYLNWYQQKPGKAPKLLIYAASSLQSGVPSRFSGSGSGTDFTLTISSLQPEDFATYYCQQSYTLAFGQGTKVDIKTTTPAPRPPTPAPTIASQPLSLRPEACRPAAGGAVHTRGLDFACDIYIWAPLAGTCGVLLLSLVITLYCKRGRKKLLYIFKQPFMRPVQTTQEEDGCSCRFPEEEEGGCELRVKFSRSADAPAYKQGQNQLYNELNLGRREEYDVLDKRRGRDPEMGGKPRRKNPQEGLYNELQKDKMAEAYSEIGMKGERRRGKGHDGLYQGLSTATKDTYDALHMQALPPR

SEQ ID NO: 109 - protein, 483 aa, Artificial Sequence
  source: /note="Description of Artificial Sequence: Synthetic polypeptide"
MALPVTALLLPLALLLHAARPEVQLVESGGGLVQPGGSLRLSCAVSGFALSNHGMSWVRRAPGKGLEWVSGIVYSGSTYYAASVKGRFTISRDNSRNTLYLQMNSLRPEDTAIYYCSAHGGESDVWGQGTTVTVSSASGGGGSGGRASGGGGSDIQLTQSPSSLSASVGDRVTITCRASQSISSYLNWYQQKPGKAPKLLIYAASSLQSGVPSRFSGSGSGTDFTLTISSLQPEDFATYYCQQSYSTPYTFGQGTKVEIKTTTPAPRPPTPAPTIASQPLSLRPEACRPAAGGAVHTRGLDFACDIYIWAPLAGTCGVLLLSLVITLYCKRGRKKLLYIFKQPFMRPVQTTQEEDGCSCRFPEEEEGGCELRVKFSRSADAPAYKQGQNQLYNELNLGRREEYDVLDKRRGRDPEMGGKPRRKNPQEGLYNELQKDKMAEAYSEIGMKGERRRGKGHDGLYQGLSTATKDTYDALHMQALPPR

SEQ ID NO: 110 - protein, 490 aa, Artificial Sequence
  source: /note="Description of Artificial Sequence: Synthetic polypeptide"
MALPVTALLLPLALLLHAARPQVQLVQSGGGLVKPGGSLRLSCAASGFTFSDYYMSWIRQAPGKGLEWVSYISSSGNTIYYADSVKGRFTISRDNAKNSLYLQMNSLRAEDTAVYYCARSTMVREDYWGQGTLVTVSSASGGGGSGGRASGGGGSDIVLTQSPLSLPVTLGQPASISCKSSESLVHNSGKTYLNWFHQRPGQSPRRLIYEVSNRDSGVPDRFTGSGSGTDFTLKISRVEAEDVGVYYCMQGTHWPGTFGQGTKLEIKTTTPAPRPPTPAPTIASQPLSLRPEACRPAAGGAVHTRGLDFACDIYIWAPLAGTCGVLLLSLVITLYCKRGRKKLLYIFKQPFMRPVQTTQEEDGCSCRFPEEEEGGCELRVKFSRSADAPAYKQGQNQLYNELNLGRREEYDVLDKRRGRDPEMGGKPRRKNPQEGLYNELQKDKMAEAYSEIGMKGERRRGKGHDGLYQGLSTATKDTYDALHMQALPPR

SEQ ID NO: 111 - protein, 483 aa, Artificial Sequence
  source: /note="Description of Artificial Sequence: Synthetic polypeptide"
MALPVTALLLPLALLLHAARPQVQLVESGGGLVQPGGSLRLSCAVSGFALSNHGMSWVRRAPGKGLEWVSGIVYSGSTYYAASVKGRFTISRDNSRNTLYLQMNSLRPEDTAIYYCSAHGGESDVWGQGTTVTVSSASGGGGSGGRASGGGGSDIRLTQSPSPLSASVGDRVTITCQASEDINKFLNWYHQTPGKAPKLLIYDASTLQTGVPSRFSGSGSGTDFTLTINSLQPEDIGTYYCQQYESLPLTFGGGTKVEIKTTTPAPRPPTPAPTIASQPLSLRPEACRPAAGGAVHTRGLDFACDIYIWAPLAGTCGVLLLSLVITLYCKRGRKKLLYIFKQPFMRPVQTTQEEDGCSCRFPEEEEGGCELRVKFSRSADAPAYKQGQNQLYNELNLGRREEYDVLDKRRGRDPEMGGKPRRKNPQEGLYNELQKDKMAEAYSEIGMKGERRRGKGHDGLYQGLSTATKDTYDALHMQALPPR

SEQ ID NO: 112 - protein, 484 aa, Artificial Sequence
  source: /note="Description of Artificial Sequence: Synthetic polypeptide"
MALPVTALLLPLALLLHAARPEVQLVETGGGLVQPGGSLRLSCAVSGFALSNHGMSWVRRAPGKGLEWVSGIVYSGSTYYAASVKGRFTISRDNSRNTLYLQMNSLRPEDTAIYYCSAHGGESDVWGQGTTVTVSSASGGGGSGGRASGGGGSETTLTQSPATLSVSPGERATLSCRASQSVGSNLAWYQQKPGQGPRLLIYGASTRATGIPARFSGSGSGTEFTLTISSLQPEDFAVYYCQQYNDWLPVTFGQGTKVEIKTTTPAPRPPTPAPTIASQPLSLRPEACRPAAGGAVHTRGLDFACDIYIWAPLAGTCGVLLLSLVITLYCKRGRKKLLYIFKQPFMRPVQTTQEEDGCSCRFPEEEEGGCELRVKFSRSADAPAYKQGQNQLYNELNLGRREEYDVLDKRRGRDPEMGGKPRRKNPQEGLYNELQKDKMAEAYSEIGMKGERRRGKGHDGLYQGLSTATKDTYDALHMQALPPR

SEQ ID NO: 113 - protein, 485 aa, Artificial Sequence
  source: /note="Description of Artificial Sequence: Synthetic polypeptide"
MALPVTALLLPLALLLHAARPEVQLVESGGGLVQPGGSLRLSCAVSGFALSNHGMSWVRRAPGKGLEWVSGIVYSGSTYYAASVKGRFTISRDNSRNTLYLQMNSLRPEDTAIYYCSAHGGESDVWGQGTTVTVSSASGGGGSGGRASGGGGSEIVLTQSPGTLSLSPGERATLSCRASQSIGSSSLAWYQQKPGQAPRLLMYGASSRASGIPDRFSGSGSGTDFTLTISRLEPEDFAVYYCQQYAGSPPFTFGQGTKVEIKTTTPAPRPPTPAPTIASQPLSLRPEACRPAAGGAVHTRGLDFACDIYIWAPLAGTCGVLLLSLVITLYCKRGRKKLLYIFKQPFMRPVQTTQEEDGCSCRFPEEEEGGCELRVKFSRSADAPAYKQGQNQLYNELNLGRREEYDVLDKRRGRDPEMGGKPRRKNPQEGLYNELQKDKMAEAYSEIGMKGERRRGKGHDGLYQGLSTATKDTYDALHMQALPPR

SEQ ID NO: 114 - DNA, 1470 bp, Artificial Sequence
  source: /note="Description of Artificial Sequence: Synthetic polynucleotide"
atggccctccctgtcaccgccctgctgcttccgctggctcttctgctccacgccgctcggccccaagtgcaactcgtggaatctggtggaggactcgtgcaacccggaagatcgcttagactgtcgtgtgccgccagcgggttcactttctcgaactacgcgatgtcctgggtccgccaggcacccggaaagggactcggttgggtgtccggcatttcccggtccggcgaaaatacctactacgccgactccgtgaagggccgcttcaccatctcaagggacaacagcaaaaacaccctgtacttgcaaatgaactccctgcgggatgaagatacagccgtgtactattgcgcccggtcgcctgcccattactacggcggaatggacgtctggggacagggaaccactgtgactgtcagcagcgcgtcgggtggcggcggctcagggggtcgggcctccggggggggagggtccgacatcgtgctgacccagtccccgggaaccctgagcctgagcccgggagagcgcgcgaccctgtcatgccgggcatcccagagcattagctcctcctttctcgcctggtatcagcagaagcccggacaggccccgaggctgctgatctacggcgctagcagaagggctaccggaatcccagaccggttctccggctccggttccgggaccgatttcacccttactatctcgcgcctggaacctgaggactccgccgtctactactgccagcagtaccactcatccccgtcgtggacgttcggacagggcaccaagctggagattaagaccactaccccagcaccgaggccacccaccccggctcctaccatcgcctcccagcctctgtccctgcgtccggaggcatgtagacccgcagctggtggggccgtgcatacccggggtcttgacttcgcctgcgatatctacatttgggcccctctggctggtacttgcggggtcctgctgctttcactcgtgatcactctttactgtaagcgcggtcggaagaagctgctgtacatctttaagcaacccttcatgaggcctgtgcagactactcaagaggaggacggctgttcatgccggttcccagaggaggaggaaggcggctgcgaactgcgcgtgaaattcagccgcagcgcagatgctccagcctacaagcaggggcagaaccagctctacaacgaactcaatcttggtcggagagaggagtacgacgtgctggacaagcggagaggacgggacccagaaatgggcgggaagccgcgcagaaagaatccccaagagggcctgtacaacgagctccaaaaggataagatggcagaagcctatagcgagattggtatgaaaggggaacgcagaagaggcaaaggccacgacggactgtaccagggactcagcaccgccaccaaggacacctatgacgctcttcacatgcaggccctgccgcctcgg

SEQ ID NO: 115 - DNA, 1464 bp, Artificial Sequence
  source: /note="Description of Artificial Sequence: Synthetic polynucleotide"
atggccctccctgtcaccgccctgctgcttccgctggctcttctgctccacgccgctcggccccaagtgcaactcgtcgaatccggtggaggtctggtccaacctggtagaagcctgagactgtcgtgtgcggccagcggattcacctttgatgactatgctatgcactgggtgcggcaggccccaggaaagggcctggaatgggtgtcgggaattagctggaactccgggtccattggctacgccgactccgtgaagggccgcttcaccatctcccgcgacaacgcaaagaactccctgtacttgcaaatgaactcgctcagggctgaggataccgcgctgtactactgctccgtgcattccttcctggcctactggggacagggaactctggtcaccgtgtcgagcgcctccggcggcgggggctcgggtggacgggcctcgggcggaggggggtccgacatcgtgatgacccagaccccgctgagcttgcccgtgactcccggagagcctgcatccatctcctgccggtcatcccagtcccttctccactccaacggatacaactacctcgactggtacctccagaagccgggacagagccctcagcttctgatctacctggggtcaaatagagcctcaggagtgccggatcggttcagcggatctggttcgggaactgatttcactctgaagatttcccgcgtggaagccgaggacgtgggcgtctactactgtatgcaggcgctgcagaccccctataccttcggccaagggacgaaagtggagatcaagaccactaccccagcaccgaggccacccaccccggctcctaccatcgcctcccagcctctgtccctgcgtccggaggcatgtagacccgcagctggtggggccgtgcatacccggggtcttgacttcgcctgcgatatctacatttgggcccctctggctggtacttgcggggtcctgctgctttcactcgtgatcactctttactgtaagcgcggtcggaagaagctgctgtacatctttaagcaacccttcatgaggcctgtgcagactactcaagaggaggacggctgttcatgccggttcccagaggaggaggaaggcggctgcgaactgcgcgtgaaattcagccgcagcgcagatgctccagcctacaagcaggggcagaaccagctctacaacgaactcaatcttggtcggagagaggagtacgacgtgctggacaagcggagaggacgggacccagaaatgggcgggaagccgcgcagaaagaatccccaagagggcctgtacaacgagctccaaaaggataagatggcagaagcctatagcgagattggtatgaaaggggaacgcagaagaggcaaaggccacgacggactgtaccagggactcagcaccgccaccaaggacacctatgacgctcttcacatgcaggccctgccgcctcgg

SEQ ID NO: 116 - DNA, 1461 bp, Artificial Sequence
  source: /note="Description of Artificial Sequence: Synthetic polynucleotide"
atggccctccctgtcaccgccctgctgcttccgctggctcttctgctccacgccgctcggcccgaagtgcaattgttggaatctggaggaggacttgtgcagcctggaggatcactgagactttcgtgtgcggtgtcaggcttcgccctgagcaaccacggcatgagctgggtgcggagagccccggggaagggtctggaatgggtgtccgggatcgtctactccggttcaacttactacgccgcaagcgtgaagggtcgcttcaccatttcccgcgataactcccggaacaccctgtacctccaaatgaactccctgcggcccgaggacaccgccatctactactgttccgcgcatggaggagagtccgatgtctggggacagggcactaccgtgaccgtgtcgagcgcctcggggggaggaggctccggcggtcgcgcctccggggggggtggcagcgacattgtgatgacgcagactccactctcgctgtccgtgaccccgggacagcccgcgtccatctcgtgcaagagctcccagagcctgctgaggaacgacggaaagactcctctgtattggtacctccagaaggctggacagcccccgcaactgctcatctacgaagtgtcaaatcgcttctccggggtgccggatcggttttccggctcgggatcgggcaccgacttcaccctgaaaatctccagggtcgaggccgaggacgtgggagcctactactgcatgcaaaacatccagttcccttccttcggcggcggcacaaagctggagattaagaccactaccccagcaccgaggccacccaccccggctcctaccatcgcctcccagcctctgtccctgcgtccggaggcatgtagacccgcagctggtggggccgtgcatacccggggtcttgacttcgcctgcgatatctacatttgggcccctctggctggtacttgcggggtcctgctgctttcactcgtgatcactctttactgtaagcgcggtcggaagaagctgctgtacatctttaagcaacccttcatgaggcctgtgcagactactcaagaggaggacggctgttcatgccggttcccagaggaggaggaaggcggctgcgaactgcgcgtgaaattcagccgcagcgcagatgctccagcctacaagcaggggcagaaccagctctacaacgaactcaatcttggtcggagagaggagtacgacgtgctggacaagcggagaggacgggacccagaaatgggcgggaagccgcgcagaaagaatccccaagagggcctgtacaacgagctccaaaaggataagatggcagaagcctatagcgagattggtatgaaaggggaacgcagaagaggcaaaggccacgacggactgtaccagggactcagcaccgccaccaaggacacctatgacgctcttcacatgcaggccctgccgcctcgg

SEQ ID NO: 117 - DNA, 1479 bp, Artificial Sequence
  source: /note="Description of Artificial Sequence: Synthetic polynucleotide"
atggccctccctgtcaccgccctgctgcttccgctggctcttctgctccacgccgctcggccccaagtccaactcgtccagtccggcgcagaagtcagaaaaaccggtgctagcgtgaaagtgtcctgcaaggcctccggctacattttcgataacttcggaatcaactgggtcagacaggccccgggccaggggctggaatggatgggatggatcaaccccaagaacaacaacaccaactacgcacagaagttccagggccgcgtgactatcaccgccgatgaatcgaccaataccgcctacatggaggtgtcctccctgcggtcggaggacactgccgtgtattactgcgcgaggggcccatactactaccaaagctacatggacgtctggggacagggaaccatggtgaccgtgtcatccgcctccggtggtggaggctccggggggcgggcttcaggaggcggaggaagcgatattgtgatgacccagactccgcttagcctgcccgtgactcctggagaaccggcctccatttcctgccggtcctcgcaatcactcctgcattccaacggttacaactacctgaattggtacctccagaagcctggccagtcgccccagttgctgatctatctgggctcgaagcgcgcctccggggtgcctgaccggtttagcggatctgggagcggcacggacttcactctccacatcacccgcgtgggagcggaggacgtgggagtgtactactgtatgcaggcgctgcagactccgtacacattcggacagggcaccaagctggagatcaagaccactaccccagcaccgaggccacccaccccggctcctaccatcgcctcccagcctctgtccctgcgtccggaggcatgtagacccgcagctggtggggccgtgcatacccggggtcttgacttcgcctgcgatatctacatttgggcccctctggctggtacttgcggggtcctgctgctttcactcgtgatcactctttactgtaagcgcggtcggaagaagctgctgtacatctttaagcaacccttcatgaggcctgtgcagactactcaagaggaggacggctgttcatgccggttcccagaggaggaggaaggcggctgcgaactgcgcgtgaaattcagccgcagcgcagatgctccagcctacaagcaggggcagaaccagctctacaacgaactcaatcttggtcggagagaggagtacgacgtgctggacaagcggagaggacgggacccagaaatgggcgggaagccgcgcagaaagaatccccaagagggcctgtacaacgagctccaaaaggataagatggcagaagcctatagcgagattggtatgaaaggggaacgcagaagaggcaaaggccacgacggactgtaccagggactcagcaccgccaccaaggacacctatgacgctcttcacatgcaggccctgccgcctcgg

SEQ ID NO: 118 - DNA, 1470 bp, Artificial Sequence
  source: /note="Description of Artificial Sequence: Synthetic polynucleotide"
atggccctccctgtcaccgccctgctgcttccgctggctcttctgctccacgccgctcggccccaagtgcaacttcaagaatcaggcggaggactcgtgcagcccggaggatcattgcggctctcgtgcgccgcctcgggcttcaccttctcgagcgacgccatgacctgggtccgccaggccccggggaaggggctggaatgggtgtctgtgatttccggctccgggggaactacgtactacgccgattccgtgaaaggtcgcttcactatctcccgggacaacagcaagaacaccctttatctgcaaatgaattccctccgcgccgaggacaccgccgtgtactactgcgccaagctggactcctcgggctactactatgcccggggtccgagatactggggacagggaaccctcgtgaccgtgtcctccgcgtccggcggaggagggtcgggagggcgggcctccggcggcggcggttcggacatccagctgacccagtccccatcctcactgagcgcaagcgtgggcgacagagtcaccattacatgcagggcgtcccagagcatcagctcctacctgaactggtaccaacagaagcctggaaaggctcctaagctgttgatctacggggcttcgaccctggcatccggggtgcccgcgaggtttagcggaagcggtagcggcactcacttcactctgaccattaacagcctccagtccgaggattcagccacttactactgtcagcagtcctacaagcgggccagcttcggacagggcactaaggtcgagatcaagaccactaccccagcaccgaggccacccaccccggctcctaccatcgcctcccagcctctgtccctgcgtccggaggcatgtagacccgcagctggtggggccgtgcatacccggggtcttgacttcgcctgcgatatctacatttgggcccctctggctggtacttgcggggtcctgctgctttcactcgtgatcactctttactgtaagcgcggtcggaagaagctgctgtacatctttaagcaacccttcatgaggcctgtgcagactactcaagaggaggacggctgttcatgccggttcccagaggaggaggaaggcggctgcgaactgcgcgtgaaattcagccgcagcgcagatgctccagcctacaagcaggggcagaaccagctctacaacgaactcaatcttggtcggagagaggagtacgacgtgctggacaagcggagaggacgggacccagaaatgggcgggaagccgcgcagaaagaatccccaagagggcctgtacaacgagctccaaaaggataagatggcagaagcctatagcgagattggtatgaaaggggaacgcagaagaggcaaaggccacgacggactgtaccagggactcagcaccgccaccaaggacacctatgacgctcttcacatgcaggccctgccgcctcgg

SEQ ID NO: 119 - DNA, 1473 bp, Artificial Sequence
  source: /note="Description of Artificial Sequence: Synthetic polynucleotide"
atggccctccctgtcaccgccctgctgcttccgctggctcttctgctccacgccgctcggccccaagtccaactggtccagagcggtgcagaagtgaagaagcccggagcgagcgtgaaagtgtcctgcaaggcttccgggtacaccttctccaactacggcatcacttgggtgcgccaggccccgggacagggcctggaatggatggggtggatttccgcgtacaacggcaatacgaactacgctcagaagttccagggtagagtgaccatgactaggaacacctccatttccaccgcctacatggaactgtcctccctgcggagcgaggacaccgccgtgtactattgcgcccggggaccatactactactacatggatgtctgggggaaggggactatggtcaccgtgtcatccgcctcgggaggcggcggatcaggaggacgcgcctctggtggtggaggatcggagatcgtgatgacccagagccctctctccttgcccgtgactcctggggagcccgcatccatttcatgccggagctcccagtcacttctctactccaacggctataactacgtggattggtacctccaaaagccgggccagagcccgcagctgctgatctacctgggctcgaacagggccagcggagtgcctgaccggttctccgggtcgggaagcgggaccgacttcaagctgcaaatctcgagagtggaggccgaggacgtgggaatctactactgtatgcagggccgccagtttccgtactcgttcggacagggcaccaaagtggaaatcaagaccactaccccagcaccgaggccacccaccccggctcctaccatcgcctcccagcctctgtccctgcgtccggaggcatgtagacccgcagctggtggggccgtgcatacccggggtcttgacttcgcctgcgatatctacatttgggcccctctggctggtacttgcggggtcctgctgctttcactcgtgatcactctttactgtaagcgcggtcggaagaagctgctgtacatctttaagcaacccttcatgaggcctgtgcagactactcaagaggaggacggctgttcatgccggttcccagaggaggaggaaggcggctgcgaactgcgcgtgaaattcagccgcagcgcagatgctccagcctacaagcaggggcagaaccagctctacaacgaactcaatcttggtcggagagaggagtacgacgtgctggacaagcggagaggacgggacccagaaatgggcgggaagccgcgcagaaagaatccccaagagggcctgtacaacgagctccaaaaggataagatggcagaagcctatagcgagattggtatgaaaggggaacgcagaagaggcaaaggccacgacggactgtaccagggactcagcaccgccaccaaggacacctatgacgctcttcacatgcaggccctgccgcctcgg

SEQ ID NO: 120 - DNA, 1446 bp, Artificial Sequence
  source: /note="Description of Artificial Sequence: Synthetic polynucleotide"
atggccctccctgtcaccgccctgctgcttccgctggctcttctgctccacgccgctcggcccgaagtgcaattgctcgaaactggaggaggtctggtgcaacctggaggatcacttcgcctgtcctgcgccgtgtcgggctttgccctgtccaaccatggaatgagctgggtccgccgcgcgccggggaagggcctcgaatgggtgtccggcatcgtctactccggctccacctactacgccgcgtccgtgaagggccggttcacgatttcacgggacaactcgcggaacaccctgtacctccaaatgaattcccttcggccggaggatactgccatctactactgctccgcccacggtggcgaatccgacgtctggggccagggaaccaccgtgaccgtgtccagcgcgtccgggggaggaggaagcgggggtagagcatcgggtggaggcggatcagagatcgtgctgacccagtcccccgccaccttgagcgtgtcaccaggagagtccgccaccctgtcatgccgcgccagccagtccgtgtcctccaacctggcttggtaccagcagaagccggggcaggcccctagactcctgatctatggggcgtcgacccgggcatctggaattcccgataggttcagcggatcgggctcgggcactgacttcactctgaccatctcctcgctgcaagccgaggacgtggctgtgtactactgtcagcagtacggaagctccctgactttcggtggcgggaccaaagtcgagattaagaccactaccccagcaccgaggccacccaccccggctcctaccatcgcctcccagcctctgtccctgcgtccggaggcatgtagacccgcagctggtggggccgtgcatacccggggtcttgacttcgcctgcgatatctacatttgggcccctctggctggtacttgcggggtcctgctgctttcactcgtgatcactctttactgtaagcgcggtcggaagaagctgctgtacatctttaagcaacccttcatgaggcctgtgcagactactcaagaggaggacggctgttcatgccggttcccagaggaggaggaaggcggctgcgaactgcgcgtgaaattcagccgcagcgcagatgctccagcctacaagcaggggcagaaccagctctacaacgaactcaatcttggtcggagagaggagtacgacgtgctggacaagcggagaggacgggacccagaaatgggcgggaagccgcgcagaaagaatccccaagagggcctgtacaacgagctccaaaaggataagatggcagaagcctatagcgagattggtatgaaaggggaacgcagaagaggcaaaggccacgacggactgtaccagggactcagcaccgccaccaaggacacctatgacgctcttcacatgcaggccctgccgcctcgg

SEQ ID NO: 121 - DNA, 1449 bp, Artificial Sequence
  source: /note="Description of Artificial Sequence: Synthetic polynucleotide"
atggccctccctgtcaccgccctgctgcttccgctggctcttctgctccacgccgctcggcccgaagtgcaattggtggaaactggaggaggacttgtgcaacctggaggatcattgagactgagctgcgcagtgtcgggattcgccctgagcaaccatggaatgtcctgggtcagaagggcccctggaaaaggcctcgaatgggtgtcagggatcgtgtactccggttccacttactacgccgcctccgtgaaggggcgcttcactatctcacgggataactcccgcaataccctgtacctccaaatgaacagcctgcggccggaggataccgccatctactactgttccgcccacggtggagagtctgacgtctggggccagggaactaccgtgaccgtgtcctccgcgtccggcggtggagggagcggcggccgcgccagcggcggcggaggctccgagatcgtgatgacccagagccccgctactctgtcggtgtcgcccggagaaagggcgaccctgtcctgccgggcgtcgcagtccgtgagcagcaagctggcttggtaccagcagaagccgggccaggcaccacgcctgcttatgtacggtgcctccattcgggccaccggaatcccggaccggttctcggggtcggggtccggtaccgagttcacactgaccatttcctcgctcgagcccgaggactttgccgtctattactgccagcagtacggctcctcctcatggacgttcggccaggggaccaaggtcgaaatcaagaccactaccccagcaccgaggccacccaccccggctcctaccatcgcctcccagcctctgtccctgcgtccggaggcatgtagacccgcagctggtggggccgtgcatacccggggtcttgacttcgcctgcgatatctacatttgggcccctctggctggtacttgcggggtcctgctgctttcactcgtgatcactctttactgtaagcgcggtcggaagaagctgctgtacatctttaagcaacccttcatgaggcctgtgcagactactcaagaggaggacggctgttcatgccggttcccagaggaggaggaaggcggctgcgaactgcgcgtgaaattcagccgcagcgcagatgctccagcctacaagcaggggcagaaccagctctacaacgaactcaatcttggtcggagagaggagtacgacgtgctggacaagcggagaggacgggacccagaaatgggcgggaagccgcgcagaaagaatccccaagagggcctgtacaacgagctccaaaaggataagatggcagaagcctatagcgagattggtatgaaaggggaacgcagaagaggcaaaggccacgacggactgtaccagggactcagcaccgccaccaaggacacctatgacgctcttcacatgcaggccctgccgcctcgg

SEQ ID NO: 122 - DNA, 1455 bp, Artificial Sequence
  source: /note="Description of Artificial Sequence: Synthetic polynucleotide"
atggccctccctgtcaccgccctgctgcttccgctggctcttctgctccacgccgctcggcccgaagtgcaattggtggagactggaggaggagtggtgcaacctggaggaagcctgagactgtcatgcgcggtgtcgggcttcgccctctccaaccacggaatgtcctgggtccgccgggcccctgggaaaggacttgaatgggtgtccggcatcgtgtactcgggttccacctactacgcggcctcagtgaagggccggtttactattagccgcgacaactccagaaacacactgtacctccaaatgaactcgctgcggccggaagataccgctatctactactgctccgcccatgggggagagtcggacgtctggggacagggcaccactgtcactgtgtccagcgcttccggcggtggtggaagcgggggacgggcctcaggaggcggtggcagcgagattgtgctgacccagtcccccgggaccctgagcctgtccccgggagaaagggccaccctctcctgtcgggcatcccagtccgtggggtctactaaccttgcatggtaccagcagaagcccggccaggcccctcgcctgctgatctacgacgcgtccaatagagccaccggcatcccggatcgcttcagcggaggcggatcgggcaccgacttcaccctcaccatttcaaggctggaaccggaggacttcgccgtgtactactgccagcagtatggttcgtccccaccctggacgttcggccaggggactaaggtcgagatcaagaccactaccccagcaccgaggccacccaccccggctcctaccatcgcctcccagcctctgtccctgcgtccggaggcatgtagacccgcagctggtggggccgtgcatacccggggtcttgacttcgcctgcgatatctacatttgggcccctctggctggtacttgcggggtcctgctgctttcactcgtgatcactctttactgtaagcgcggtcggaagaagctgctgtacatctttaagcaacccttcatgaggcctgtgcagactactcaagaggaggacggctgttcatgccggttcccagaggaggaggaaggcggctgcgaactgcgcgtgaaattcagccgcagcgcagatgctccagcctacaagcaggggcagaaccagctctacaacgaactcaatcttggtcggagagaggagtacgacgtgctggacaagcggagaggacgggacccagaaatgggcgggaagccgcgcagaaagaatccccaagagggcctgtacaacgagctccaaaaggataagatggcagaagcctatagcgagattggtatgaaaggggaacgcagaagaggcaaaggccacgacggactgtaccagggactcagcaccgccaccaaggacacctatgacgctcttcacatgcaggccctgccgcctcgg

SEQ ID NO: 123 - DNA, 1449 bp, Artificial Sequence
  source: /note="Description of Artificial Sequence: Synthetic polynucleotide"
atggccctccctgtcaccgccctgctgcttccgctggctcttctgctccacgccgctcggccccaagtgcaactcgtggaatctggtggaggactcgtgaaacctggaggatcattgagactgtcatgcgcggcctcgggattcacgttctccgattactacatgagctggattcgccaggctccggggaagggactggaatgggtgtcctacatttcctcatccggctccaccatctactacgcggactccgtgaaggggagattcaccattagccgcgataacgccaagaacagcctgtaccttcagatgaactccctgcgggctgaagatactgccgtctactactgcgcaagggagagcggagatgggatggacgtctggggacagggtaccactgtgaccgtgtcgtcggcctccggcggagggggttcgggtggaagggccagcggcggcggaggcagcgacatccagatgacccagtccccctcatcgctgtccgcctccgtgggcgaccgcgtcaccatcacatgccgggcctcacagtcgatctcctcctacctcaattggtatcagcagaagcccggaaaggcccctaagcttctgatctacgcagcgtcctccctgcaatccggggtcccatctcggttctccggctcgggcagcggtaccgacttcactctgaccatctcgagcctgcagccggaggacttcgccacttactactgtcagcaaagctacaccctcgcgtttggccagggcaccaaagtggacatcaagaccactaccccagcaccgaggccacccaccccggctcctaccatcgcctcccagcctctgtccctgcgtccggaggcatgtagacccgcagctggtggggccgtgcatacccggggtcttgacttcgcctgcgatatctacatttgggcccctctggctggtacttgcggggtcctgctgctttcactcgtgatcactctttactgtaagcgcggtcggaagaagctgctgtacatctttaagcaacccttcatgaggcctgtgcagactactcaagaggaggacggctgttcatgccggttcccagaggaggaggaaggcggctgcgaactgcgcgtgaaattcagccgcagcgcagatgctccagcctacaagcaggggcagaaccagctctacaacgaactcaatcttggtcggagagaggagtacgacgtgctggacaagcggagaggacgggacccagaaatgggcgggaagccgcgcagaaagaatccccaagagggcctgtacaacgagctccaaaaggataagatggcagaagcctatagcgagattggtatgaaaggggaacgcagaagaggcaaaggccacgacggactgtaccagggactcagcaccgccaccaaggacacctatgacgctcttcacatgcaggccctgccgcctcgg

SEQ ID NO: 124 - DNA, 1449 bp, Artificial Sequence
  source: /note="Description of Artificial Sequence: Synthetic polynucleotide"
atggccctccctgtcaccgccctgctgcttccgctggctcttctgctccacgccgctcggcccgaagtgcaattggtggaatcagggggaggacttgtgcagcctggaggatcgctgagactgtcatgtgccgtgtccggctttgccctgtccaaccacgggatgtcctgggtccgccgcgcgcctggaaagggcctcgaatgggtgtcgggtattgtgtacagcggtagcacctactatgccgcatccgtgaaggggagattcaccatcagccgggacaactccaggaacactctgtacctccaaatgaattcgctgaggccagaggacactgccatctactactgctccgcgcatggcggagagtccgacgtctggggacaggggaccaccgtgaccgtgtctagcgcgtccggcggaggcggcagcgggggtcgggcatcagggggcggcggatcggacatccagctcacccagtccccgagctcgctgtccgcctccgtgggagatcgggtcaccatcacgtgccgcgccagccagtcgatttcctcctacctgaactggtaccaacagaagcccggaaaagccccgaagcttctcatctacgccgcctcgagcctgcagtcaggagtgccctcacggttctccggctccggttccggtactgatttcaccctgaccatttcctccctgcaaccggaggacttcgctacttactactgccagcagtcgtactccaccccctacactttcggacaaggcaccaaggtcgaaatcaagaccactaccccagcaccgaggccacccaccccggctcctaccatcgcctcccagcctctgtccctgcgtccggaggcatgtagacccgcagctggtggggccgtgcatacccggggtcttgacttcgcctgcgatatctacatttgggcccctctggctggtacttgcggggtcctgctgctttcactcgtgatcactctttactgtaagcgcggtcggaagaagctgctgtacatctttaagcaacccttcatgaggcctgtgcagactactcaagaggaggacggctgttcatgccggttcccagaggaggaggaaggcggctgcgaactgcgcgtgaaattcagccgcagcgcagatgctccagcctacaagcaggggcagaaccagctctacaacgaactcaatcttggtcggagagaggagtacgacgtgctggacaagcggagaggacgggacccagaaatgggcgggaagccgcgcagaaagaatccccaagagggcctgtacaacgagctccaaaaggataagatggcagaagcctatagcgagattggtatgaaaggggaacgcagaagaggcaaaggccacgacggactgtaccagggactcagcaccgccaccaaggacacctatgacgctcttcacatgcaggccctgccgcctcgg

SEQ ID NO: 125 - DNA, 1470 bp, Artificial Sequence
  source: /note="Description of Artificial Sequence: Synthetic polynucleotide"
atggccctccctgtcaccgccctgctgcttccgctggctcttctgctccacgccgctcggccccaagtgcaactggtgcaaagcggaggaggattggtcaaacccggaggaagcctgagactgtcatgcgcggcctctggattcaccttctccgattactacatgtcatggatcagacaggccccggggaagggcctcgaatgggtgtcctacatctcgtcctccgggaacaccatctactacgccgacagcgtgaagggccgctttaccatttcccgcgacaacgcaaagaactcgctgtaccttcagatgaattccctgcgggctgaagataccgcggtgtactattgcgcccggtccactatggtccgggaggactactggggacagggcacactcgtgaccgtgtccagcgcgagcgggggtggaggcagcggtggacgcgcctccggcggcggcggttcagacatcgtgctgactcagtcgcccctgtcgctgccggtcaccctgggccaaccggcctcaattagctgcaagtcctcggagagcctggtgcacaactcaggaaagacttacctgaactggttccatcagcggcctggacagtccccacggaggctcatctatgaagtgtccaacagggattcgggggtgcccgaccgcttcactggctccgggtccggcaccgacttcaccttgaaaatctccagagtggaagccgaggacgtgggcgtgtactactgtatgcagggtacccactggcctggaacctttggacaaggaactaagctcgagattaagaccactaccccagcaccgaggccacccaccccggctcctaccatcgcctcccagcctctgtccctgcgtccggaggcatgtagacccgcagctggtggggccgtgcatacccggggtcttgacttcgcctgcgatatctacatttgggcccctctggctggtacttgcggggtcctgctgctttcactcgtgatcactctttactgtaagcgcggtcggaagaagctgctgtacatctttaagcaacccttcatgaggcctgtgcagactactcaagaggaggacggctgttcatgccggttcccagaggaggaggaaggcggctgcgaactgcgcgtgaaattcagccgcagcgcagatgctccagcctacaagcaggggcagaaccagctctacaacgaactcaatcttggtcggagagaggagtacgacgtgctggacaagcggagaggacgggacccagaaatgggcgggaagccgcgcagaaagaatccccaagagggcctgtacaacgagctccaaaaggataagatggcagaagcctatagcgagattggtatgaaaggggaacgcagaagaggcaaaggccacgacggactgtaccagggactcagcaccgccaccaaggacacctatgacgctcttcacatgcaggccctgccgcctcgg

SEQ ID NO: 126 - DNA, 1449 bp, Artificial Sequence
  source: /note="Description of Artificial Sequence: Synthetic polynucleotide"
atggccctccctgtcaccgccctgctgcttccgctggctcttctgctccacgccgctcggccccaagtgcaactcgtggaatctggtggaggactcgtgcaacccggtggaagccttaggctgtcgtgcgccgtcagcgggtttgctctgagcaaccatggaatgtcctgggtccgccgggcaccgggaaaagggctggaatgggtgtccggcatcgtgtacagcgggtcaacctattacgccgcgtccgtgaagggcagattcactatctcaagagacaacagccggaacaccctgtacttgcaaatgaattccctgcgccccgaggacaccgccatctactactgctccgcccacggaggagagtcggacgtgtggggccagggaacgactgtgactgtgtccagcgcatcaggagggggtggttcgggcggccgggcctcggggggaggaggttccgacattcggctgacccagtccccgtccccactgtcggcctccgtcggcgaccgcgtgaccatcacttgtcaggcgtccgaggacattaacaagttcctgaactggtaccaccagacccctggaaaggcccccaagctgctgatctacgatgcctcgacccttcaaactggagtgcctagccggttctccgggtccggctccggcactgatttcactctgaccatcaactcattgcagccggaagatatcgggacctactattgccagcagtacgaatccctcccgctcacattcggcgggggaaccaaggtcgagattaagaccactaccccagcaccgaggccacccaccccggctcctaccatcgcctcccagcctctgtccctgcgtccggaggcatgtagacccgcagctggtggggccgtgcatacccggggtcttgacttcgcctgcgatatctacatttgggcccctctggctggtacttgcggggtcctgctgctttcactcgtgatcactctttactgtaagcgcggtcggaagaagctgctgtacatctttaagcaacccttcatgaggcctgtgcagactactcaagaggaggacggctgttcatgccggttcccagaggaggaggaaggcggctgcgaactgcgcgtgaaattcagccgcagcgcagatgctccagcctacaagcaggggcagaaccagctctacaacgaactcaatcttggtcggagagaggagtacgacgtgctggacaagcggagaggacgggacccagaaatgggcgggaagccgcgcagaaagaatccccaagagggcctgtacaacgagctccaaaaggataagatggcagaagcctatagcgagattggtatgaaaggggaacgcagaagaggcaaaggccacgacggactgtaccagggactcagcaccgccaccaaggacacctatgacgctcttcacatgcaggccctgccgcctcgg

SEQ ID NO: 127 - DNA, 1452 bp, Artificial Sequence
  source: /note="Description of Artificial Sequence: Synthetic polynucleotide"
atggccctccctgtcaccgccctgctgcttccgctggctcttctgctccacgccgctcggcccgaagtgcaattggtggaaactggaggaggacttgtgcaacctggaggatcattgcggctctcatgcgctgtctccggcttcgccctgtcaaatcacgggatgtcgtgggtcagacgggccccgggaaagggtctggaatgggtgtcggggattgtgtacagcggctccacctactacgccgcttcggtcaagggccgcttcactatttcacgggacaacagccgcaacaccctctatctgcaaatgaactctctccgcccggaggataccgccatctactactgctccgcacacggcggcgaatccgacgtgtggggacagggaaccactgtcaccgtgtcgtccgcatccggtggcggaggatcgggtggccgggcctccgggggcggcggcagcgagactaccctgacccagtcccctgccactctgtccgtgagcccgggagagagagccacccttagctgccgggccagccagagcgtgggctccaacctggcctggtaccagcagaagccaggacagggtcccaggctgctgatctacggagcctccactcgcgcgaccggcatccccgcgaggttctccgggtcgggttccgggaccgagttcaccctgaccatctcctccctccaaccggaggacttcgcggtgtactactgtcagcagtacaacgattggctgcccgtgacatttggacaggggacgaaggtggaaatcaaaaccactaccccagcaccgaggccacccaccccggctcctaccatcgcctcccagcctctgtccctgcgtccggaggcatgtagacccgcagctggtggggccgtgcatacccggggtcttgacttcgcctgcgatatctacatttgggcccctctggctggtacttgcggggtcctgctgctttcactcgtgatcactctttactgtaagcgcggtcggaagaagctgctgtacatctttaagcaacccttcatgaggcctgtgcagactactcaagaggaggacggctgttcatgccggttcccagaggaggaggaaggcggctgcgaactgcgcgtgaaattcagccgcagcgcagatgctccagcctacaagcaggggcagaaccagctctacaacgaactcaatcttggtcggagagaggagtacgacgtgctggacaagcggagaggacgggacccagaaatgggcgggaagccgcgcagaaagaatccccaagagggcctgtacaacgagctccaaaaggataagatggcagaagcctatagcgagattggtatgaaaggggaacgcagaagaggcaaaggccacgacggactgtaccagggactcagcaccgccaccaaggacacctatgacgctcttcacatgcaggccctgccgcctcgg

SEQ ID NO: 128 - DNA, 1455 bp, Artificial Sequence
  source: /note="Description of Artificial Sequence: Synthetic polynucleotide"
atggccctccctgtcaccgccctgctgcttccgctggctcttctgctccacgccgctcggcccgaagtgcaattggtggaatctggtggaggacttgtgcaacctggaggatcactgagactgtcatgcgcggtgtccggttttgccctgagcaatcatgggatgtcgtgggtccggcgcgcccccggaaagggtctggaatgggtgtcgggtatcgtctactccgggagcacttactacgccgcgagcgtgaagggccgcttcaccatttcccgcgataactcccgcaacaccctgtacttgcaaatgaactcgctccggcctgaggacactgccatctactactgctccgcacacggaggagaatccgacgtgtggggccagggaactaccgtgaccgtcagcagcgcctccggcggcgggggctcaggcggacgggctagcggcggcggtggctccgagatcgtgctgacccagtcgcctggcactctctcgctgagccccggggaaagggcaaccctgtcctgtcgggccagccagtccattggatcatcctccctcgcctggtatcagcagaaaccgggacaggctccgcggctgcttatgtatggggccagctcaagagcctccggcattcccgaccggttctccgggtccggttccggcaccgatttcaccctgactatctcgaggctggagccagaggacttcgccgtgtactactgccagcagtacgcggggtccccgccgttcacgttcggacagggaaccaaggtcgagatcaagaccactaccccagcaccgaggccacccaccccggctcctaccatcgcctcccagcctctgtccctgcgtccggaggcatgtagacccgcagctggtggggccgtgcatacccggggtcttgacttcgcctgcgatatctacatttgggcccctctggctggtacttgcggggtcctgctgctttcactcgtgatcactctttactgtaagcgcggtcggaagaagctgctgtacatctttaagcaacccttcatgaggcctgtgcagactactcaagaggaggacggctgttcatgccggttcccagaggaggaggaaggcggctgcgaactgcgcgtgaaattcagccgcagcgcagatgctccagcctacaagcaggggcagaaccagctctacaacgaactcaatcttggtcggagagaggagtacgacgtgctggacaagcggagaggacgggacccagaaatgggcgggaagccgcgcagaaagaatccccaagagggcctgtacaacgagctccaaaaggataagatggcagaagcctatagcgagattggtatgaaaggggaacgcagaagaggcaaaggccacgacggactgtaccagggactcagcaccgccaccaaggacacctatgacgctcttcacatgcaggccctgccgcctcgg

SEQ ID NO: 129 - protein, 243 aa, Artificial Sequence
  source: /note="Description of Artificial Sequence: Synthetic polypeptide"
QVQLQESGPGLVKPSETLSLTCTVSGGSISSSYYYWGWIRQPPGKGLEWIGSIYYSGSAYYNPSLKSRVTISVDTSKNQFSLRLSSVTAADTAVYYCARHWQEWPDAFDIWGQGTMVTVSSGGGGSGGGGSGGGGSETTLTQSPAFMSATPGDKVIISCKASQDIDDAMNWYQQKPGEAPLFIIQSATSPVPGIPPRFSGSGFGTDFSLTINNIESEDAAYYFCLQHDNFPLTFGQGTKLEIK

SEQ ID NO: 130 - protein, 244 aa, Artificial Sequence
  source: /note="Description of Artificial Sequence: Synthetic polypeptide"
VNLRESGPALVKPTQTLTLTCTFSGFSLRTSGMCVSWIRQPPGKALEWLARIDWDEDKFYSTSLKTRLTISKDTSDNQVVLRMTNMDPADTATYYCARSGAGGTSATAFDIWGPGTMVTVSSGGGGSGGGGSGGGGSDIQMTQSPSSLSASVGDRVTITCRASQDIYNNLAWFQLKPGSAPRSLMYAANKSQSGVPSRFSGSASGTDFTLTISSLQPEDFATYYCQHYYRFPYSFGQGTKLEIK

SEQ ID NO: 131 - protein, 246 aa, Artificial Sequence
  source: /note="Description of Artificial Sequence: Synthetic polypeptide"
EVQLVESGGGLVKPGGSLRLSCAASGFTFSSYSMNWVRQAPGKGLEWVSSISSSSSYIYYADSVKGRFTISRDNAKNSLYLQMNSLRAEDTAVYYCAKTIAAVYAFDIWGQGTTVTVSSGGGGSGGGGSGGGGSEIVLTQSPLSLPVTPEEPASISCRSSQSLLHSNGYNYLDWYLQKPGQSPQLLIYLGSNRASGVPDRFSGSGSGTDFTLKISRVEAEDVGVYYCMQALQTPYTFGQGTKLEIK

SEQ ID NO: 132 - protein, 240 aa, Artificial Sequence
  source: /note="Description of Artificial Sequence: Synthetic polypeptide"
EVQLVESGGGLVKPGGSLRLSCAASGFTFSDYYMSWIRQAPGKGLEWVSYISSSGSTIYYADSVKGRFTISRDNAKNSLYLQMNSLRAEDTAVYYCARDLRGAFDIWGQGTMVTVSSGGGGSGGGGSGGGGSSYVLTQSPSVSAAPGYTATISCGGNNIGTKSVHWYQQKPGQAPLLVIRDDSVRPSKIPGRFSGSNSGNMATLTISGVQAGDEADFYCQVWDSDSEHVVFGGGTKLTVL

SEQ ID NO: 133 - protein, 241 aa, Artificial Sequence
  source: /note="Description of Artificial Sequence: Synthetic polypeptide"
QVQLVQSGAEVKKPGASVKVSCKPSGYTVTSHYIHWVRRAPGQGLEWMGMINPSGGVTAYSQTLQGRVTMTSDTSSSTVYMELSSLRSEDTAMYYCAREGSGSGWYFDFWGRGTLVTVSSGGGGSGGGGSGGGGSSYVLTQPPSVSVSPGQTASITCSGDGLSKKYVSWYQQKAGQSPVVLISRDKERPSGIPDRFSGSNSADTATLTISGTQAMDEADYYCQAWDDTTVVFGGGTKLTVL

SEQ ID NO: 134 - protein, 245 aa, Artificial Sequence
  source: /note="Description of Artificial Sequence: Synthetic polypeptide"
QVQLQESGPGLVKPSQTLSLTCTVSGGSISSGGYYWSWIRQHPGKGLEWIGYIYYSGSTYYNPSLKSRVTISVDTSKNQFSLKLSSVTAADTAVYYCARAGIAARLRGAFDIWGQGTMVTVSSGGGGSGGGGSGGGGSDIVMTQSPSSVSASVGDRVIITCRASQGIRNWLAWYQQKPGKAPNLLIYAASNLQSGVPSRFSGSGSGADFTLTISSLQPEDVATYYCQKYNSAPFTFGPGTKVDIK

SEQ ID NO: 135 - protein, 253 aa, Artificial Sequence
  source: /note="Description of Artificial Sequence: Synthetic polypeptide"
QVQLVQSGAEVKKPGSSVKVSCKASGGTFSSYAISWVRQAPGQGLEWMGGIIPIFGTANYAQKFQGRVTITADESTSTAYMELSSLRSEDTAVYYCARRGGYQLLRWDVGLLRSAFDIWGQGTMVTVSSGGGGSGGGGSGGGGSSYVLTQPPSVSVAPGQTARITCGGNNIGSKSVHWYQQKPGQAPVLVLYGKNNRPSGVPDRFSGSRSGTTASLTITGAQAEDEADYYCSSRDSSGDHLRVFGTGTKVTVL

SEQ ID NO: 136 - protein, 248 aa, Artificial Sequence
  source: /note="Description of Artificial Sequence: Synthetic polypeptide"
EVQLQQSGPGLVKPSQTLSLTCAISGDSVSSNSAAWNWIRQSPSRGLEWLGRTYYRSKWYSFYAISLKSRIIINPDTSKNQFSLQLKSVTPEDTAVYYCARSSPEGLFLYWFDPWGQGTLVTVSSGGDGSGGGGSGGGGSSSELTQDPAVSVALGQTIRITCQGDSLGNYYATWYQQKPGQAPVLVIYGTNNRPSGIPDRFSASSSGNTASLTITGAQAEDEADYYCNSRDSSGHHLLFGTGTKVTVL

SEQ ID NO: 137 - protein, 246 aa, Artificial Sequence
  source: /note="Description of Artificial Sequence: Synthetic polypeptide"
EVQLVESGGGLVQPGGSLRLSCAASGFTFSSYAMSWVRQAPGKGLEWVSAISGSGGSTYYADSVKGRFTISRDNSKNTLYLQMNSLRAEDTAVYYCAKVEGSGSLDYWGQGTLVTVSSGGGGSGGGGSGGGGSEIVMTQSPGTLSLSPGERATLSCRASQSVSSAYLAWYQQKPGQPPRLLISGASTRATGIPDRFGGSGSGTDFTLTISRLEPEDFAVYYCQHYGSSFNGSSLFTFGQGTRLEIK

SEQ ID NO: 138 - protein, 241 aa, Artificial Sequence
  source: /note="Description of Artificial Sequence: Synthetic polypeptide"
EVQLVETGGGLVQPGGSLRLSCAASGITFSRYPMSWVRQAPGKGLEWVSGISDSGVSTYYADSAKGRFTISRDNSKNTLFLQMSSLRDEDTAVYYCVTRAGSEASDIWGQGTMVTVSSGGGGSGGGGSGGGGSEIVLTQSPATLSLSPGERATLSCRASQSVSNSLAWYQQKPGQAPRLLIYDASSRATGIPDRFSGSGSGTDFTLTISRLEPEDFAIYYCQQFGTSSGLTFGGGTKLEIK

SEQ ID NO: 139 - protein, 248 aa, Artificial Sequence
  source: /note="Description of Artificial Sequence: Synthetic polypeptide"
QVQLVESGGGLVQPGGSLRLSCAASGFTFSSYAMSWVRQAPGKGLEWVSAISGSGGSTYYADSVKGRFTISRDNAKNSLYLQMNSLRAEDTAIYYCARATYKRELRYYYGMDVWGQGTMVTVSSGGGGSGGGGSGGGGSEIVMTQSPGTVSLSPGERATLSCRASQSVSSSFLAWYQQKPGQAPRLLIYGASSRATGIPDRFSGSGSGTDFTLTISRLEPEDSAVYYCQQYHSSPSWTFGQGTRLEIK

SEQ ID NO: 140 - protein, 248 aa, Artificial Sequence
  source: /note="Description of Artificial Sequence: Synthetic polypeptide"
EVQLVETGGGLVQPGGSLRLSCAASGFTFSSYAMSWVRQAPGKGLEWVSAISGSGGSTYYADSVKGRFTISRDNSKNTLYLQMNTLKAEDTAVYYCARATYKRELRYYYGMDVWGQGTTVTVSSGGGGSGGGGSGGGGSEIVLTQSPSTLSLSPGESATLSCRASQSVSTTFLAWYQQKPGQAPRLLIYGSSNRATGIPDRFSGSGSGTDFTLTIRRLEPEDFAVYYCQQYHSSPSWTFGQGTKVEIK

SEQ ID NO: 141 - protein, 239 aa, Artificial Sequence
  source: /note="Description of Artificial Sequence: Synthetic polypeptide"
EVQLVETGGGLVQPGRSLRLSCAASGFTFDDYAMHWVRQAPGKGLEWVSGISWNSGSIGYADSVKGRFTISRDNAKNSLYLQMNSLRDEDTAVYYCARVGKAVPDVWGQGTTVTVSSGGGGSGGGGSGGGGSDIVMTQTPSSLSASVGDRVTITCRASQSISSYLNWYQQKPGKAPKLLIYAASSLQSGVPSRFSGSGSGTDFTLTISSLQPEDFATYYCQQSYSTPYSFGQGTRLEIK

SEQ ID NO: 142 - protein, 246 aa, Artificial Sequence
  source: /note="Description of Artificial Sequence: Synthetic polypeptide"
EVQLVESGGGLVQPGRSLRLSCTASGFTFDDYAMHWVRQRPGKGLEWVASINWKGNSLAYGDSVKGRFAISRDNAKNTVFLQMNSLRTEDTAVYYCASHQGVAYYNYAMDVWGRGTLVTVSSGGGGSGGGGSGGGGSEIVLTQSPGTLSLSPGERATLSCRATQSIGSSFLAWYQQRPGQAPRLLIYGASQRATGIPDRFSGRGSGTDFTLTISRVEPEDSAVYYCQHYESSPSWTFGQGTKVEIK

SEQ ID NO: 143 - protein, 241 aa, Artificial Sequence
  source: /note="Description of Artificial Sequence: Synthetic polypeptide"
EVQLVESGGGLVQPGGSLRLSCAASGFTFSSYAMSWVRQAPGKGLEWVSAISGSGGSTYYADSVKGRFTISRDNSKNTLYLQMNSLRAEDTAVYYCAKVVRDGMDVWGQGTTVTVSSGGGGSGGGGSGGGGSEIVLTQSPATLSLSPGERATLSCRASQSVSSSYLAWYQQKPGQAPRLLIYGASSRATGIPDRFSGNGSGTDFTLTISRLEPEDFAVYYCQQYGSPPRFTFGPGTKVDIK

SEQ ID NO: 144 - protein, 242 aa, Artificial Sequence
  source: /note="Description of Artificial Sequence: Synthetic polypeptide"
EVQLLESGGGLVQPGGSLRLSCAASGFTFSSYAMSWVRQAPGKGLEWVSAISGSGGSTYYADSVKGRFTISRDNSKNTLYLQMNSLRAEDTAVYYCAKIPQTGTFDYWGQGTLVTVSSGGGGSGGGGSGGGGSEIVLTQSPGTLSLSPGERATLSCRASQSVSSSYLAWYQQRPGQAPRLLIYGASSRATGIPDRFSGSGSGTDFTLTISRLEPEDFAVYYCQHYGSSPSWTFGQGTRLEIK

SEQ ID NO: 145 - protein, 248 aa, Artificial Sequence
  source: /note="Description of Artificial Sequence: Synthetic polypeptide"
EVQLVETGGGLVQPGGSLRLSCAASGFTFSSYAMSWVRQAPGKGLEWVSAISGSGGSTYYADSVKGRFTMSRENDKNSVFLQMNSLRVEDTGVYYCARANYKRELRYYYGMDVWGQGTMVTVSSGGGGSGGGGSGGGGSEIVMTQSPGTLSLSPGESATLSCRASQRVASNYLAWYQHKPGQAPSLLISGASSRATGVPDRFSGSGSGTDFTLAISRLEPEDSAVYYCQHYDSSPSWTFGQGTKVEIK

SEQ ID NO: 146 - protein, 244 aa, Artificial Sequence
  source: /note="Description of Artificial Sequence: Synthetic polypeptide"
EVQLLETGGGLVQPGGSLRLSCAASGFSFSSYAMSWVRQAPGKGLEWVSAISGSGGSTYYADSVKGRFTISRDNSKNTLYLQMNSLRAEDTAVYYCAKALVGATGAFDIWGQGTLVTVSSGGGGSGGGGSGGGGSEIVLTQSPGTLSLSPGERATLSCRASQSLSSNFLAWYQQKPGQAPGLLIYGASNWATGTPDRFSGSGSGTDFTLTITRLEPEDFAVYYCQYYGTSPMYTFGQGTKVEIK

SEQ ID NO: 147 - protein, 244 aa, Artificial Sequence
  source: /note="Description of Artificial Sequence: Synthetic polypeptide"
EVQLLESGGGLVQPGGSLRLSCAASGFTFSSYAMSWVRQAPGKGLEWVSAISGSGGSTYYADSVKGRFTISRDNSKNTLYLQMNSLRAEDTAVYYCVLWFGEGFDPWGQGTLVTVSSGGGGSGGGGSGGGGSDIVLTQSPLSLPVTPGEPASISCRSSQSLLHSNGYNYLDWYLQKPGQSPQLLIYLGSNRASGVPDRFSGSGSGTDFTLKISRVEAEDVGVYYCMQALQTPLTFGGGTKVDIK

SEQ ID NO: 148 - protein, 251 aa, Artificial Sequence
  source: /note="Description of Artificial Sequence: Synthetic polypeptide"
QVQLVESGGGLVQPGGSLRLSCAASGFTFSSYAMSWVRQAPGKGLEWVSAISGSGGSTYYADSVKGRFTISRDNSKNTLYLQMNSLRAEDTAVYYCAKVGYDSSGYYRDYYGMDVWGQGTTVTVSSGGGGSGGGGSGGGGSEIVLTQSPGTLSLSPGERATLSCRASQSVSSSYLAWYQQKPGQAPRLLIYGTSSRATGISDRFSGSGSGTDFTLTISRLEPEDFAVYYCQHYGNSPPKFTFGPGTKLEIK

SEQ ID NO: 149 - protein, 246 aa, Artificial Sequence
  source: /note="Description of Artificial Sequence: Synthetic polypeptide"
EVQLVESGGGLVQPGGSLRLSCAASGFTFSSYAMSWVRQAPGKGLEWVSAISGSGGSTYYADSVKGRFTISRDNSKNTLYLQMNSLRAEDTAVYYCAKMGWSSGYLGAFDIWGQGTTVTVSSGGGGSGGGGSGGGGSEIVLTQSPGTLSLSPGERATLSCRASQSVASSFLAWYQQKPGQAPRLLIYGASGRATGIPDRFSGSGSGTDFTLTISRLEPEDFAVYYCQHYGGSPRLTFGGGTKVDIK

SEQ ID NO: 150 - DNA, 729 bp, Artificial Sequence
  source: /note="Description of Artificial Sequence: Synthetic polynucleotide"
caagtgcagcttcaggaaagcggaccgggcctggtcaagccatccgaaactctctccctgacttgcactgtgtctggcggttccatctcatcgtcgtactactactggggctggattaggcagccgcccggaaagggactggagtggatcggaagcatctactattccggctcggcgtactacaaccctagcctcaagtcgagagtgaccatctccgtggatacctccaagaaccagttttccctgcgcctgagctccgtgaccgccgctgacaccgccgtgtactactgtgctcggcattggcaggaatggcccgatgccttcgacatttggggccagggcactatggtcactgtgtcatccgggggtggaggcagcgggggaggagggtccggggggggaggttcagagacaaccttgacccagtcacccgcattcatgtccgccactccgggagacaaggtcatcatctcgtgcaaagcgtcccaggatatcgacgatgccatgaattggtaccagcagaagcctggcgaagcgccgctgttcattatccaatccgcaacctcgcccgtgcctggaatcccaccgcggttcagcggcagcggtttcggaaccgacttttccctgaccattaacaacattgagtccgaggacgccgcctactacttctgcctgcaacacgacaacttccctctcacgttcggccagggaaccaagctggaaatcaag

SEQ ID NO: 151 - DNA, 735 bp, Artificial Sequence
  source: /note="Description of Artificial Sequence: Synthetic polynucleotide"
caagtcaatctgcgcgaatccggccccgccttggtcaagcctacccagaccctcactctgacctgtactttctccggcttctccctgcggacttccgggatgtgcgtgtcctggatcagacagcctccgggaaaggccctggagtggctcgctcgcattgactgggatgaggacaagttctactccacctcactcaagaccaggctgaccatcagcaaagatacctctgacaaccaagtggtgctccgcatgaccaacatggacccagccgacactgccacttactactgcgcgaggagcggagcgggcggaacctccgccaccgccttcgatatttggggcccgggtaccatggtcaccgtgtcaagcggaggaggggggtccgggggcggcggttccgggggaggcggatcggacattcagatgactcagtcaccatcgtccctgagcgctagcgtgggcgacagagtgacaatcacttgccgggcatcccaggacatctataacaaccttgcgtggttccagctgaagcctggttccgcaccgcggtcacttatgtacgccgccaacaagagccagtcgggagtgccgtcccggttttccggttcggcctcgggaactgacttcaccctgacgatctccagcctgcaacccgaggatttcgccacctactactgccagcactactaccgctttccctactcgttcggacagggaaccaagctggaaatcaag

SEQ ID NO: 152 - DNA, 738 bp, Artificial Sequence
  source: /note="Description of Artificial Sequence: Synthetic polynucleotide"
gaagtgcagcttgtcgaatccggggggggactggtcaagccgggcggatcactgagactgtcctgcgccgcgagcggcttcacgttctcctcctactccatgaactgggtccgccaagcccccgggaagggactggaatgggtgtcctctatctcctcgtcgtcgtcctacatctactacgccgactccgtgaagggaagattcaccatttcccgcgacaacgcaaagaactcactgtacttgcaaatgaactcactccgggccgaagatactgctgtgtactattgcgccaagactattgccgccgtctacgctttcgacatctggggccagggaaccaccgtgactgtgtcgtccggtggtggtggctcgggcggaggaggaagcggcggcggggggtccgagattgtgctgacccagtcgccactgagcctccctgtgacccccgaggaacccgccagcatcagctgccggtccagccagtccctgctccactccaacggatacaattacctcgattggtaccttcagaagcctggacaaagcccgcagctgctcatctacttgggatcaaaccgcgcgtcaggagtgcctgaccggttctccggctcgggcagcggtaccgatttcaccctgaaaatctccagggtggaggcagaggacgtgggagtgtattactgtatgcaggcgctgcagactccgtacacatttgggcagggcaccaagctggagatcaag

SEQ ID NO: 153 - DNA, 720 bp, Artificial Sequence
  source: /note="Description of Artificial Sequence: Synthetic polynucleotide"
gaagtccagctcgtggagtccggcggaggccttgtgaagcctggaggttcgctgagactgtcctgcgccgcctccggcttcaccttctccgactactacatgtcctggatcagacaggccccgggaaagggcctggaatgggtgtcctacatctcgtcatcgggcagcactatctactacgcggactcagtgaaggggcggttcaccatttcccgggataacgcgaagaactcgctgtatctgcaaatgaactcactgagggccgaggacaccgccgtgtactactgcgcccgcgatctccgcggggcatttgacatctggggacagggaaccatggtcacagtgtccagcggagggggaggatcgggtggcggaggttccgggggtggaggctcctcctacgtgctgactcagagcccaagcgtcagcgctgcgcccggttacacggcaaccatctcctgtggcggaaacaacattgggaccaagtctgtgcactggtatcagcagaagccgggccaagctcccctgttggtgatccgcgatgactccgtgcggcctagcaaaattccgggacggttctccggctccaacagcggcaatatggccactctcaccatctcgggagtgcaggccggagatgaagccgacttctactgccaagtctgggactcagactccgagcatgtggtgttcgggggcggaaccaagctgactgtgctc

SEQ ID NO: 154 - DNA, 723 bp, Artificial Sequence
  source: /note="Description of Artificial Sequence: Synthetic polynucleotide"
caagtgcagctggtgcagagcggggccgaagtcaagaagccgggagcctccgtgaaagtgtcctgcaagccttcgggatacaccgtgacctcccactacattcattgggtccgccgcgcccccggccaaggactcgagtggatgggcatgatcaaccctagcggcggagtgaccgcgtacagccagacgctgcagggacgcgtgactatgacctcggatacctcctcctccaccgtctatatggaactgtccagcctgcggtccgaggataccgccatgtactactgcgcccgggaaggatcaggctccgggtggtatttcgacttctggggaagaggcaccctcgtgactgtgtcatctgggggagggggttccggtggtggcggatcgggaggaggcggttcatcctacgtgctgacccagccaccctccgtgtccgtgagccccggccagactgcatcgattacatgtagcggcgacggcctctccaagaaatacgtgtcgtggtaccagcagaaggccggacagagcccggtggtgctgatctcaagagataaggagcggcctagcggaatcccggacaggttctcgggttccaactccgcggacactgctactctgaccatctcggggacccaggctatggacgaagccgattactactgccaagcctgggacgacactactgtcgtgtttggagggggcaccaagttgaccgtcctt

SEQ ID NO: 155 - DNA, 735 bp, Artificial Sequence
  source: /note="Description of Artificial Sequence: Synthetic polynucleotide"
caagtgcagcttcaggagagcggcccgggactcgtgaagccgtcccagaccctgtccctgacttgcaccgtgtcgggaggaagcatctcgagcggaggctactattggtcgtggattcggcagcaccctggaaagggcctggaatggatcggctacatctactactccggctcgacctactacaacccatcgctgaagtccagagtgacaatctcagtggacacgtccaagaatcagttcagcctgaagctctcttccgtgactgcggccgacaccgccgtgtactactgcgcacgcgctggaattgccgcccggctgaggggtgccttcgacatttggggacagggcaccatggtcaccgtgtcctccggcggcggaggttccgggggtggaggctcaggaggaggggggtccgacatcgtcatgactcagtcgccctcaagcgtcagcgcgtccgtcggggacagagtgatcatcacctgtcgggcgtcccagggaattcgcaactggctggcctggtatcagcagaagcccggaaaggcccccaacctgttgatctacgccgcctcaaacctccaatccggggtgccgagccgcttcagcggctccggttcgggtgccgatttcactctgaccatctcctccctgcaacctgaagatgtggctacctactactgccaaaagtacaactccgcaccttttactttcggaccggggaccaaagtggacattaag

SEQ ID NO: 156 - DNA, 759 bp, Artificial Sequence
  source: /note="Description of Artificial Sequence: Synthetic polynucleotide"
caagtgcagctggtccagtcgggcgccgaggtcaagaagcccgggagctctgtgaaagtgtcctgcaaggcctccgggggcacctttagctcctacgccatctcctgggtccgccaagcaccgggtcaaggcctggagtggatggggggaattatccctatcttcggcactgccaactacgcccagaagttccagggacgcgtgaccattaccgcggacgaatccacctccaccgcttatatggagctgtccagcttgcgctcggaagataccgccgtgtactactgcgcccggaggggtggataccagctgctgagatgggacgtgggcctcctgcggtcggcgttcgacatctggggccagggcactatggtcactgtgtccagcggaggaggcggatcgggaggcggcggatcagggggaggcggttccagctacgtgcttactcaacccccttcggtgtccgtggccccgggacagaccgccagaatcacttgcggaggaaacaacattgggtccaagagcgtgcattggtaccagcagaagccaggacaggcccctgtgctggtgctctacgggaagaacaatcggcccagcggagtgccggacaggttctcgggttcacgctccggtacaaccgcttcactgactatcaccggggcccaggcagaggatgaagcggactactactgttcctcccgggattcatccggcgaccacctccgggtgttcggaaccggaacgaaggtcaccgtgctg

SEQ ID NO: 157 - DNA, 744 bp, Artificial Sequence
  source: /note="Description of Artificial Sequence: Synthetic polynucleotide"
gaagtgcagctccaacagtcaggaccggggctcgtgaagccatcccagaccctgtccctgacttgtgccatctcgggagatagcgtgtcatcgaactccgccgcctggaactggattcggcagagcccgtcccgcggactggagtggcttggaaggacctactaccggtccaagtggtactctttctacgcgatctcgctgaagtcccgcattatcattaaccctgatacctccaagaatcagttctccctccaactgaaatccgtcacccccgaggacacagcagtgtattactgcgcacggagcagccccgaaggactgttcctgtattggtttgacccctggggccaggggactcttgtgaccgtgtcgagcggcggagatgggtccggtggcggtggttcggggggcggcggatcatcatccgaactgacccaggacccggctgtgtccgtggcgctgggacaaaccatccgcattacgtgccagggagactccctgggcaactactacgccacttggtaccagcagaagccgggccaagcccctgtgttggtcatctacgggaccaacaacagaccttccggcatccccgaccggttcagcgcttcgtcctccggcaacactgccagcctgaccatcactggagcgcaggccgaagatgaggccgactactactgcaacagcagagactcctcgggtcatcacctcttgttcggaactggaaccaaggtcaccgtgctg

SEQ ID NO: 158 - DNA, 738 bp, Artificial Sequence
  source: /note="Description of Artificial Sequence: Synthetic polynucleotide"
gaagtgcagctcgtggagtcaggaggcggcctggtccagccgggagggtcccttagactgtcatgcgccgcaagcggattcactttctcctcctatgccatgagctgggtccgccaagcccccggaaagggactggaatgggtgtccgccatctcggggtctggaggctcaacttactacgctgactccgtgaagggacggttcaccattagccgcgacaactccaagaacaccctctacctccaaatgaactccctgcgggccgaggataccgccgtctactactgcgccaaagtggaaggttcaggatcgctggactactggggacagggtactctcgtgaccgtgtcatcgggcggaggaggttccggcggtggcggctccggcggcggagggtcggagatcgtgatgacccagagccctggtactctgagcctttcgccgggagaaagggccaccctgtcctgccgcgcttcccaatccgtgtcctccgcgtacttggcgtggtaccagcagaagccgggacagccccctcggctgctgatcagcggggccagcacccgggcaaccggaatcccagacagattcgggggttccggcagcggcacagatttcaccctgactatttcgaggttggagcccgaggactttgcggtgtattactgtcagcactacgggtcgtcctttaatggctccagcctgttcacgttcggacaggggacccgcctggaaatcaag

SEQ ID NO: 159 - DNA, 723 bp, Artificial Sequence
  source: /note="Description of Artificial Sequence: Synthetic polynucleotide"
gaagtgcaactggtggaaaccggtggcggcctggtgcagcctggaggatcattgaggctgtcatgcgcggccagcggtattaccttctcccggtaccccatgtcctgggtcagacaggccccggggaaagggcttgaatgggtgtccgggatctcggactccggtgtcagcacttactacgccgactccgccaagggacgcttcaccatttcccgggacaactcgaagaacaccctgttcctccaaatgagctccctccgggacgaggatactgcagtgtactactgcgtgacccgcgccgggtccgaggcgtctgacatttggggacagggcactatggtcaccgtgtcgtccggcggagggggctcgggaggcggtggcagcggaggaggagggtccgagatcgtgctgacccaatccccggccaccctctcgctgagccctggagaaagggcaaccttgtcctgtcgcgcgagccagtccgtgagcaactccctggcctggtaccagcagaagcccggacaggctccgagacttctgatctacgacgcttcgagccgggccactggaatccccgaccgcttttcggggtccggctcaggaaccgatttcaccctgacaatctcacggctggagccagaggatttcgccatctattactgccagcagttcggtacttcctccggcctgactttcggaggcggcacgaagctcgaaatcaag

SEQ ID NO: 160 - DNA, 744 bp, Artificial Sequence
  source: /note="Description of Artificial Sequence: Synthetic polynucleotide"
caagtgcagctcgtggaatcgggtggcggactggtgcagccggggggctcacttagactgtcctgcgcggccagcggattcactttctcctcctacgccatgtcctgggtcagacaggcccctggaaagggcctggaatgggtgtccgcaatcagcggcagcggcggctcgacctattacgcggattcagtgaagggcagattcaccatttcccgggacaacgccaagaactccttgtaccttcaaatgaactccctccgcgcggaagataccgcaatctactactgcgctcgggccacttacaagagggaactgcgctactactacgggatggacgtctggggccagggaaccatggtcaccgtgtccagcggaggaggaggatcgggaggaggcggtagcgggggtggagggtcggagatcgtgatgacccagtcccccggcactgtgtcgctgtcccccggcgaacgggccaccctgtcatgtcgggccagccagtcagtgtcgtcaagcttcctcgcctggtaccagcagaaaccgggacaagctccccgcctgctgatctacggagccagcagccgggccaccggtattcctgaccggttctccggttcggggtccgggaccgactttactctgactatctctcgcctcgagccagaggactccgccgtgtattactgccagcagtaccactcctccccgtcctggacgttcggacagggcacaaggctggagattaag

SEQ ID NO: 161 - DNA, 744 bp, Artificial Sequence
  source: /note="Description of Artificial Sequence: Synthetic polynucleotide"
gaggtgcagcttgtggaaaccggtggcggactggtgcagcccggaggaagcctcaggctgtcctgcgccgcgtccggcttcaccttctcctcgtacgccatgtcctgggtccgccaggcccccggaaagggcctggaatgggtgtccgccatctctggaagcggaggttccacgtactacgcggacagcgtcaagggaaggttcacaatctcccgcgataattcgaagaacactctgtaccttcaaatgaacaccctgaaggccgaggacactgctgtgtactactgcgcacgggccacctacaagagagagctccggtactactacggaatggacgtctggggccagggaactactgtgaccgtgtcctcgggagggggtggctccggggggggcggctccggcggaggcggttccgagattgtgctgacccagtcaccttcaactctgtcgctgtccccgggagagagcgctactctgagctgccgggccagccagtccgtgtccaccaccttcctcgcctggtatcagcagaagccggggcaggcaccacggctcttgatctacgggtcaagcaacagagcgaccggaattcctgaccgcttctcggggagcggttcaggcaccgacttcaccctgactatccggcgcctggaacccgaagatttcgccgtgtattactgtcaacagtaccactcctcgccgtcctggacctttggccaaggaaccaaagtggaaatcaag

SEQ ID NO: 162 - DNA, 717 bp, Artificial Sequence
  source: /note="Description of Artificial Sequence: Synthetic polynucleotide"
gaagtgcagctcgtggaaactggaggtggactcgtgcagcctggacggtcgctgcggctgagctgcgctgcatccggcttcaccttcgacgattatgccatgcactgggtcagacaggcgccagggaagggacttgagtgggtgtccggtatcagctggaatagcggctcaatcggatacgcggactccgtgaagggaaggttcaccatttcccgcgacaacgccaagaactccctgtacttgcaaatgaacagcctccgggatgaggacactgccgtgtactactgcgcccgcgtcggaaaagctgtgcccgacgtctggggccagggaaccactgtgaccgtgtccagcggcgggggtggatcgggcggtggagggtccggtggagggggctcagatattgtgatgacccagaccccctcgtccctgtccgcctcggtcggcgaccgcgtgactatcacatgtagagcctcgcagagcatctccagctacctgaactggtatcagcagaagccggggaaggccccgaagctcctgatctacgcggcatcatcactgcaatcgggagtgccgagccggttttccgggtccggctccggcaccgacttcacgctgaccatttcttccctgcaacccgaggacttcgccacttactactgccagcagtcctactccaccccttactccttcggccaaggaaccaggctggaaatcaag

SEQ ID NO: 163 - DNA, 738 bp, Artificial Sequence
  source: /note="Description of Artificial Sequence: Synthetic polynucleotide"
gaagtgcagctcgtggagagcgggggaggattggtgcagcccggaaggtccctgcggctctcctgcactgcgtctggcttcaccttcgacgactacgcgatgcactgggtcagacagcgcccgggaaagggcctggaatgggtcgcctcaatcaactggaagggaaactccctggcctatggcgacagcgtgaagggccgcttcgccatttcgcgcgacaacgccaagaacaccgtgtttctgcaaatgaattccctgcggaccgaggataccgctgtgtactactgcgccagccaccagggcgtggcatactataactacgccatggacgtgtggggaagagggacgctcgtcaccgtgtcctccgggggcggtggatcgggtggaggaggaagcggtggcgggggcagcgaaatcgtgctgactcagagcccgggaactctttcactgtccccgggagaacgggccactctctcgtgccgggccacccagtccatcggctcctccttccttgcctggtaccagcagaggccaggacaggcgccccgcctgctgatctacggtgcttcccaacgcgccactggcattcctgaccggttcagcggcagagggtcgggaaccgatttcacactgaccatttcccgggtggagcccgaagattcggcagtctactactgtcagcattacgagtcctccccttcatggaccttcggtcaagggaccaaagtggagatcaag

SEQ ID NO: 164 - DNA, 18 bp, Artificial Sequence
  source: /note="Description of Artificial Sequence: Synthetic oligonucleotide"
tactacaacctgccctgg

SEQ ID NO: 165 - DNA, 726 bp, Artificial Sequence
  source: /note="Description of Artificial Sequence: Synthetic polynucleotide"
gaagtgcagctgctggagtccggcggtggattggtgcaaccggggggatcgctcagactgtcctgtgcggcgtcaggcttcaccttctcgagctacgccatgtcatgggtcagacaggcccctggaaagggtctggaatgggtgtccgccatttccgggagcgggggatctacatactacgccgatagcgtgaagggccgcttcaccatttcccgggacaactccaagaacactctctatctgcaaatgaactccctccgcgctgaggacactgccgtgtactactgcgccaaaatccctcagaccggcaccttcgactactggggacaggggactctggtcaccgtcagcagcggtggcggaggttcggggggaggaggaagcggcggcggagggtccgagattgtgctgacccagtcacccggcactttgtccctgtcgcctggagaaagggccaccctttcctgccgggcatcccaatccgtgtcctcctcgtacctggcctggtaccagcagaggcccggacaggccccacggcttctgatctacggagcaagcagccgcgcgaccggtatcccggaccggttttcgggctcgggctcaggaactgacttcaccctcaccatctcccgcctggaacccgaagatttcgctgtgtattactgccagcactacggcagctccccgtcctggacgttcggccagggaactcggctggagatcaag

SEQ ID NO: 166 - DNA, 744 bp, Artificial Sequence
  source: /note="Description of Artificial Sequence: Synthetic polynucleotide"
gaagtgcaactggtggaaaccggtggaggactcgtgcagcctggcggcagcctccggctgagctgcgccgcttcgggattcaccttttcctcctacgcgatgtcttgggtcagacaggcccccggaaaggggctggaatgggtgtcagccatctccggctccggcggatcaacgtactacgccgactccgtgaaaggccggttcaccatgtcgcgcgagaatgacaagaactccgtgttcctgcaaatgaactccctgagggtggaggacaccggagtgtactattgtgcgcgcgccaactacaagagagagctgcggtactactacggaatggacgtctggggacagggaactatggtgaccgtgtcatccggtggagggggaagcggcggtggaggcagcgggggcgggggttcagaaattgtcatgacccagtccccgggaactctttccctctcccccggggaatccgcgactttgtcctgccgggccagccagcgcgtggcctcgaactacctcgcatggtaccagcataagccaggccaagccccttccctgctgatttccggggctagcagccgcgccactggcgtgccggataggttctcgggaagcggctcgggtaccgatttcaccctggcaatctcgcggctggaaccggaggattcggccgtgtactactgccagcactatgactcatccccctcctggacattcggacagggcaccaaggtcgagatcaag

SEQ ID NO: 167 - DNA, 732 bp, Artificial Sequence
  source: /note="Description of Artificial Sequence: Synthetic polynucleotide"
gaagtgcagctgctcgaaaccggtggagggctggtgcagccagggggctccctgaggctttcatgcgccgctagcggattctccttctcctcttacgccatgtcgtgggtccgccaagcccctggaaaaggcctggaatgggtgtccgcgatttccgggagcggaggttcgacctattacgccgactccgtgaagggccgctttaccatctcccgggataactccaagaacactctgtacctccaaatgaactcgctgagagccgaggacaccgccgtgtattactgcgcgaaggcgctggtcggcgcgactggggcattcgacatctggggacagggaactcttgtgaccgtgtcgagcggaggcggcggctccggcggaggagggagcgggggcggtggttccgaaatcgtgttgactcagtccccgggaaccctgagcttgtcacccggggagcgggccactctctcctgtcgcgcctcccaatcgctctcatccaatttcctggcctggtaccagcagaagcccggacaggccccgggcctgctcatctacggcgcttcaaactgggcaacgggaacccctgatcggttcagcggaagcggatcgggtactgactttaccctgaccatcaccagactggaaccggaggacttcgccgtgtactactgccagtactacggcacctcccccatgtacacattcggacagggtaccaaggtcgagattaag

SEQ ID NO: 168 - DNA, 733 bp, Artificial Sequence
  source: /note="Description of Artificial Sequence: Synthetic polynucleotide"
gaagtgcagctgcttgagagcggtggaggtctggtgcagcccgggggatcactgcgcctgtcctgtgccgcgtccggtttcactttctcctcgtacgccatgtcgtgggtcagacaggcaccgggaaagggactggaatgggtgtcagccatttcgggttcggggggcagcacctactacgctgactccgtgaagggccggttcaccatttcccgcgacaactccaagaacaccttgtacctccaaatgaactccctgcgggccgaagataccgccgtgtattactgcgtgctgtggttcggagagggattcgacccgtggggacaaggaacactcgtgactgtgtcatccggcggaggcggcagcggtggcggcggttccggcggcggcggatctgacatcgtgttgacccagtcccctctgagcctgccggtcactcctggcgaaccagccagcatctcctgccggtcgagccagtccctcctgcactccaatgggtacaactacctcgattggtatctgcaaaagccgggccagagcccccagctgctgatctaccttgggtcaaaccgcgcttccggggtgcctgatagattctccgggtccgggagcggaaccgactttaccctgaaaatctcgagggtggaggccgaggacgtcggagtgtactactgcatgcaggcgctccagactcccctgaccttcggaggaggaacgaaggtcgacatcaaga

SEQ ID NO: 169 - DNA, 753 bp, Artificial Sequence
  source: /note="Description of Artificial Sequence: Synthetic polynucleotide"
caagtgcagctcgtggagtcaggcggaggactggtgcagcccgggggctccctgagactttcctgcgcggcatcgggttttaccttctcctcctatgctatgtcctgggtgcgccaggccccgggaaagggactggaatgggtgtccgcaatcagcggtagcgggggctcaacatactacgccgactccgtcaagggtcgcttcactatttcccgggacaactccaagaataccctgtacctccaaatgaacagcctcagggccgaggatactgccgtgtactactgcgccaaagtcggatacgatagctccggttactaccgggactactacggaatggacgtgtggggacagggcaccaccgtgaccgtgtcaagcggcggaggcggttcaggagggggaggctccggcggtggagggtccgaaatcgtcctgactcagtcgcctggcactctgtcgttgtccccgggggagcgcgctaccctgtcgtgtcgggcgtcgcagtccgtgtcgagctcctacctcgcgtggtaccagcagaagcccggacaggcccctagacttctgatctacggcacttcttcacgcgccaccgggatcagcgacaggttcagcggctccggctccgggaccgacttcaccctgaccattagccggctggagcctgaagatttcgccgtgtattactgccaacactacggaaactcgccgccaaagttcacgttcggacccggaaccaagctggaaatcaag

SEQ ID NO: 170 - DNA, 739 bp, Artificial Sequence
  source: /note="Description of Artificial Sequence: Synthetic polynucleotide"
gaagtccaactggtggagtccgggggagggctcgtgcagcccggaggcagccttcggctgtcgtgcgccgcctccgggttcacgttctcatcctacgcgatgtcgtgggtcagacaggcaccaggaaagggactggaatgggtgtccgccattagcggctccggcggtagcacctactatgccgactcagtgaagggaaggttcactatctcccgcgacaacagcaagaacaccctgtacctccaaatgaactctctgcgggccgaggataccgcggtgtactattgcgccaagatgggttggtccagcggatacttgggagccttcgacatttggggacagggcactactgtgaccgtgtcctccgggggtggcggatcgggaggcggcggctcgggtggagggggttccgaaatcgtgttgacccagtcaccgggaaccctctcgctgtccccgggagaacgggctacactgtcatgtagagcgtcccagtccgtggcttcctcgttcctggcctggtaccagcagaagccgggacaggcaccccgcctgctcatctacggagccagcggccgggcgaccggcatccctgaccgcttctccggttccggctcgggcaccgactttactctgaccattagcaggcttgagcccgaggattttgccgtgtactactgccaacactacggggggagccctcgcctgaccttcggaggcggaactaaggtcgatatcaaaa

SEQ ID NO: 171 - protein, 121 aa, Artificial Sequence
  source: /note="Description of Artificial Sequence: Synthetic polypeptide"
QVQLQESGPGLVKPSETLSLTCTVSGGSISSSYYYWGWIRQPPGKGLEWIGSIYYSGSAYYNPSLKSRVTISVDTSKNQFSLRLSSVTAADTAVYYCARHWQEWPDAFDIWGQGTMVTVSS

SEQ ID NO: 172 - protein, 123 aa, Artificial Sequence
  source: /note="Description of Artificial Sequence: Synthetic polypeptide"
QVNLRESGPALVKPTQTLTLTCTFSGFSLRTSGMCVSWIRQPPGKALEWLARIDWDEDKFYSTSLKTRLTISKDTSDNQVVLRMTNMDPADTATYYCARSGAGGTSATAFDIWGPGTMVTVSS

SEQ ID NO: 173 - protein, 119 aa, Artificial Sequence
  source: /note="Description of Artificial Sequence: Synthetic polypeptide"
EVQLVESGGGLVKPGGSLRLSCAASGFTFSSYSMNWVRQAPGKGLEWVSSISSSSSYIYYADSVKGRFTISRDNAKNSLYLQMNSLRAEDTAVYYCAKTIAAVYAFDIWGQGTTVTVSS

SEQ ID NO: 174 - protein, 117 aa, Artificial Sequence
  source: /note="Description of Artificial Sequence: Synthetic polypeptide"
EVQLVESGGGLVKPGGSLRLSCAASGFTFSDYYMSWIRQAPGKGLEWVSYISSSGSTIYYADSVKGRFTISRDNAKNSLYLQMNSLRAEDTAVYYCARDLRGAFDIWGQGTMVTVSS

SEQ ID NO: 175 - protein, 120 aa, Artificial Sequence
  source: /note="Description of Artificial Sequence: Synthetic polypeptide"
QVQLVQSGAEVKKPGASVKVSCKPSGYTVTSHYIHWVRRAPGQGLEWMGMINPSGGVTAYSQTLQGRVTMTSDTSSSTVYMELSSLRSEDTAMYYCAREGSGSGWYFDFWGRGTLVTVSS

SEQ ID NO: 176 - protein, 123 aa, Artificial Sequence
  source: /note="Description of Artificial Sequence: Synthetic polypeptide"
QVQLQESGPGLVKPSQTLSLTCTVSGGSISSGGYYWSWIRQHPGKGLEWIGYIYYSGSTYYNPSLKSRVTISVDTSKNQFSLKLSSVTAADTAVYYCARAGIAARLRGAFDIWGQGTMVTVSS

SEQ ID NO: 177 - protein, 129 aa, Artificial Sequence
  source: /note="Description of Artificial Sequence: Synthetic polypeptide"
QVQLVQSGAEVKKPGSSVKVSCKASGGTFSSYAISWVRQAPGQGLEWMGGIIPIFGTANYAQKFQGRVTITADESTSTAYMELSSLRSEDTAVYYCARRGGYQLLRWDVGLLRSAFDIWGQGTMVTVSS

SEQ ID NO: 178 - protein, 125 aa, Artificial Sequence
  source: /note="Description of Artificial Sequence: Synthetic polypeptide"
EVQLQQSGPGLVKPSQTLSLTCAISGDSVSSNSAAWNWIRQSPSRGLEWLGRTYYRSKWYSFYAISLKSRIIINPDTSKNQFSLQLKSVTPEDTAVYYCARSSPEGLFLYWFDPWGQGTLVTVSS

SEQ ID NO: 179 - protein, 118 aa, Artificial Sequence
  source: /note="Description of Artificial Sequence: Synthetic polypeptide"
EVQLVESGGGLVQPGGSLRLSCAASGFTFSSYAMSWVRQAPGKGLEWVSAISGSGGSTYYADSVKGRFTISRDNSKNTLYLQMNSLRAEDTAVYYCAKVEGSGSLDYWGQGTLVTVSS

SEQ ID NO: 180 - protein, 118 aa, Artificial Sequence
  source: /note="Description of Artificial Sequence: Synthetic polypeptide"
EVQLVETGGGLVQPGGSLRLSCAASGITFSRYPMSWVRQAPGKGLEWVSGISDSGVSTYYADSAKGRFTISRDNSKNTLFLQMSSLRDEDTAVYYCVTRAGSEASDIWGQGTMVTVSS

SEQ ID NO: 181 - protein, 124 aa, Artificial Sequence
  source: /note="Description of Artificial Sequence: Synthetic polypeptide"
QVQLVESGGGLVQPGGSLRLSCAASGFTFSSYAMSWVRQAPGKGLEWVSAISGSGGSTYYADSVKGRFTISRDNAKNSLYLQMNSLRAEDTAIYYCARATYKRELRYYYGMDVWGQGTMVTVSS

SEQ ID NO: 182 - protein, 124 aa, Artificial Sequence
  source: /note="Description of Artificial Sequence: Synthetic polypeptide"
EVQLVETGGGLVQPGGSLRLSCAASGFTFSSYAMSWVRQAPGKGLEWVSAISGSGGSTYYADSVKGRFTISRDNSKNTLYLQMNTLKAEDTAVYYCARATYKRELRYYYGMDVWGQGTTVTVSS

SEQ ID NO: 183 - protein, 117 aa, Artificial Sequence
  source: /note="Description of Artificial Sequence: Synthetic polypeptide"
EVQLVETGGGLVQPGRSLRLSCAASGFTFDDYAMHWVRQAPGKGLEWVSGISWNSGSIGYADSVKGRFTISRDNAKNSLYLQMNSLRDEDTAVYYCARVGKAVPDVWGQGTTVTVSS

SEQ ID NO: 184 - protein, 122 aa, Artificial Sequence
  source: /note="Description of Artificial Sequence: Synthetic polypeptide"
EVQLVESGGGLVQPGRSLRLSCTASGFTFDDYAMHWVRQRPGKGLEWVASINWKGNSLAYGDSVKGRFAISRDNAKNTVFLQMNSLRTEDTAVYYCASHQGVAYYNYAMDVWGRGTLVTVSS

SEQ ID NO: 185 - protein, 117 aa, Artificial Sequence
  source: /note="Description of Artificial Sequence: Synthetic polypeptide"
EVQLVESGGGLVQPGGSLRLSCAASGFTFSSYAMSWVRQAPGKGLEWVSAISGSGGSTYYADSVKGRFTISRDNSKNTLYLQMNSLRAEDTAVYYCAKVVRDGMDVWGQGTTVTVSS

SEQ ID NO: 186 - protein, 118 aa, Artificial Sequence
  source: /note="Description of Artificial Sequence: Synthetic polypeptide"
EVQLLESGGGLVQPGGSLRLSCAASGFTFSSYAMSWVRQAPGKGLEWVSAISGSGGSTYYADSVKGRFTISRDNSKNTLYLQMNSLRAEDTAVYYCAKIPQTGTFDYWGQGTLVTVSS

SEQ ID NO: 187 - protein, 124 aa, Artificial Sequence
  source: /note="Description of Artificial Sequence: Synthetic polypeptide"
EVQLVETGGGLVQPGGSLRLSCAASGFTFSSYAMSWVRQAPGKGLEWVSAISGSGGSTYYADSVKGRFTMSRENDKNSVFLQMNSLRVEDTGVYYCARANYKRELRYYYGMDVWGQGTMVTVSS

SEQ ID NO: 188 - protein, 120 aa, Artificial Sequence
  source: /note="Description of Artificial Sequence: Synthetic polypeptide"
EVQLLETGGGLVQPGGSLRLSCAASGFSFSSYAMSWVRQAPGKGLEWVSAISGSGGSTYYADSVKGRFTISRDNSKNTLYLQMNSLRAEDTAVYYCAKALVGATGAFDIWGQGTLVTVSS

SEQ ID NO: 189 - protein, 117 aa, Artificial Sequence
  source: /note="Description of Artificial Sequence: Synthetic polypeptide"
EVQLLESGGGLVQPGGSLRLSCAASGFTFSSYAMSWVRQAPGKGLEWVSAISGSGGSTYYADSVKGRFTISRDNSKNTLYLQMNSLRAEDTAVYYCVLWFGEGFDPWGQGTLVTVSS

SEQ ID NO: 190 - protein, 126 aa, Artificial Sequence
  source: /note="Description of Artificial Sequence: Synthetic polypeptide"
QVQLVESGGGLVQPGGSLRLSCAASGFTFSSYAMSWVRQAPGKGLEWVSAISGSGGSTYYADSVKGRFTISRDNSKNTLYLQMNSLRAEDTAVYYCAKVGYDSSGYYRDYYGMDVWGQGTTVTVSS

SEQ ID NO: 191 - protein, 122 aa, Artificial Sequence
  source: /note="Description of Artificial Sequence: Synthetic polypeptide"
EVQLVESGGGLVQPGGSLRLSCAASGFTFSSYAMSWVRQAPGKGLEWVSAISGSGGSTYYADSVKGRFTISRDNSKNTLYLQMNSLRAEDTAVYYCAKMGWSSGYLGAFDIWGQGTTVTVSS

SEQ ID NO: 192 - protein, 107 aa, Artificial Sequence
  source: /note="Description of Artificial Sequence: Synthetic polypeptide"
ETTLTQSPAFMSATPGDKVIISCKASQDIDDAMNWYQQKPGEAPLFIIQSATSPVPGIPPRFSGSGFGTDFSLTINNIESEDAAYYFCLQHDNFPLTFGQGTKLEIK

SEQ ID NO: 193 - protein, 107 aa, Artificial Sequence
  source: /note="Description of Artificial Sequence: Synthetic polypeptide"
DIQMTQSPSSLSASVGDRVTITCRASQDIYNNLAWFQLKPGSAPRSLMYAANKSQSGVPSRFSGSASGTDFTLTISSLQPEDFATYYCQHYYRFPYSFGQGTKLEIK

SEQ ID NO: 194 - protein, 112 aa, Artificial Sequence
  source: /note="Description of Artificial Sequence: Synthetic polypeptide"
EIVLTQSPLSLPVTPEEPASISCRSSQSLLHSNGYNYLDWYLQKPGQSPQLLIYLGSNRASGVPDRFSGSGSGTDFTLKISRVEAEDVGVYYCMQALQTPYTFGQGTKLEIK

SEQ ID NO: 195 - protein, 108 aa, Artificial Sequence
  source: /note="Description of Artificial Sequence: Synthetic polypeptide"
SYVLTQSPSVSAAPGYTATISCGGNNIGTKSVHWYQQKPGQAPLLVIRDDSVRPSKIPGRFSGSNSGNMATLTISGVQAGDEADFYCQVWDSDSEHVVFGGGTKLTVL

SEQ ID NO: 196 - protein, 106 aa, Artificial Sequence
  source: /note="Description of Artificial Sequence: Synthetic polypeptide"
SYVLTQPPSVSVSPGQTASITCSGDGLSKKYVSWYQQKAGQSPVVLISRDKERPSGIPDRFSGSNSADTATLTISGTQAMDEADYYCQAWDDTTVVFGGGTKLTVL

SEQ ID NO: 197 - protein, 107 aa, Artificial Sequence
  source: /note="Description of Artificial Sequence: Synthetic polypeptide"
DIVMTQSPSSVSASVGDRVIITCRASQGIRNWLAWYQQKPGKAPNLLIYAASNLQSGVPSRFSGSGSGADFTLTISSLQPEDVATYYCQKYNSAPFTFGPGTKVDIK

SEQ ID NO: 198 - protein, 109 aa, Artificial Sequence
  source: /note="Description of Artificial Sequence: Synthetic polypeptide"
SYVLTQPPSVSVAPGQTARITCGGNNIGSKSVHWYQQKPGQAPVLVLYGKNNRPSGVPDRFSGSRSGTTASLTITGAQAEDEADYYCSSRDSSGDHLRVFGTGTKVTVL

SEQ ID NO: 199 - protein, 108 aa, Artificial Sequence
  source: /note="Description of Artificial Sequence: Synthetic polypeptide"
SSELTQDPAVSVALGQTIRITCQGDSLGNYYATWYQQKPGQAPVLVIYGTNNRPSGIPDRFSASSSGNTASLTITGAQAEDEADYYCNSRDSSGHHLLFGTGTKVTVL

SEQ ID NO: 200 - protein, 113 aa, Artificial Sequence
  source: /note="Description of Artificial Sequence: Synthetic polypeptide"
EIVMTQSPGTLSLSPGERATLSCRASQSVSSAYLAWYQQKPGQPPRLLISGASTRATGIPDRFGGSGSGTDFTLTISRLEPEDFAVYYCQHYGSSFNGSSLFTFGQGTRLEIK

SEQ ID NO: 201 - protein, 108 aa, Artificial Sequence
  source: /note="Description of Artificial Sequence: Synthetic polypeptide"
EIVLTQSPATLSLSPGERATLSCRASQSVSNSLAWYQQKPGQAPRLLIYDASSRATGIPDRFSGSGSGTDFTLTISRLEPEDFAIYYCQQFGTSSGLTFGGGTKLEIK

SEQ ID NO: 202 - protein, 109 aa, Artificial Sequence
  source: /note="Description of Artificial Sequence: Synthetic polypeptide"
EIVMTQSPGTVSLSPGERATLSCRASQSVSSSFLAWYQQKPGQAPRLLIYGASSRATGIPDRFSGSGSGTDFTLTISRLEPEDSAVYYCQQYHSSPSWTFGQGTRLEIK

SEQ ID NO: 203 - protein, 109 aa, Artificial Sequence
  source: /note="Description of Artificial Sequence: Synthetic polypeptide"
EIVLTQSPSTLSLSPGESATLSCRASQSVSTTFLAWYQQKPGQAPRLLIYGSSNRATGIPDRFSGSGSGTDFTLTIRRLEPEDFAVYYCQQYHSSPSWTFGQGTKVEIK

SEQ ID NO: 204 - protein, 107 aa, Artificial Sequence
  source: /note="Description of Artificial Sequence: Synthetic polypeptide"
DIVMTQTPSSLSASVGDRVTITCRASQSISSYLNWYQQKPGKAPKLLIYAASSLQSGVPSRFSGSGSGTDFTLTISSLQPEDFATYYCQQSYSTPYSFGQGTRLEIK

SEQ ID NO: 205 - protein, 109 aa, Artificial Sequence
  source: /note="Description of Artificial Sequence: Synthetic polypeptide"
EIVLTQSPGTLSLSPGERATLSCRATQSIGSSFLAWYQQRPGQAPRLLIYGASQRATGIPDRFSGRGSGTDFTLTISRVEPEDSAVYYCQHYESSPSWTFGQGTKVEIK

SEQ ID NO: 206 - protein, 109 aa, Artificial Sequence
  source: /note="Description of Artificial Sequence: Synthetic polypeptide"
EIVLTQSPATLSLSPGERATLSCRASQSVSSSYLAWYQQKPGQAPRLLIYGASSRATGIPDRFSGNGSGTDFTLTISRLEPEDFAVYYCQQYGSPPRFTFGPGTKVDIK

SEQ ID NO: 207 - protein, 109 aa, Artificial Sequence
  source: /note="Description of Artificial Sequence: Synthetic polypeptide"
EIVLTQSPGTLSLSPGERATLSCRASQSVSSSYLAWYQQRPGQAPRLLIYGASSRATGIPDRFSGSGSGTDFTLTISRLEPEDFAVYYCQHYGSSPSWTFGQGTRLEIK

SEQ ID NO: 208 - protein, 109 aa, Artificial Sequence
  source: /note="Description of Artificial Sequence: Synthetic polypeptide"
EIVMTQSPGTLSLSPGESATLSCRASQRVASNYLAWYQHKPGQAPSLLISGASSRATGVPDRFSGSGSGTDFTLAISRLEPEDSAVYYCQHYDSSPSWTFGQGTKVEIK

SEQ ID NO: 209 - protein, 109 aa, Artificial Sequence
  source: /note="Description of Artificial Sequence: Synthetic polypeptide"
EIVLTQSPGTLSLSPGERATLSCRASQSLSSNFLAWYQQKPGQAPGLLIYGASNWATGTPDRFSGSGSGTDFTLTITRLEPEDFAVYYCQYYGTSPMYTFGQGTKVEIK

SEQ ID NO: 210 - protein, 112 aa, Artificial Sequence
  source: /note="Description of Artificial Sequence: Synthetic polypeptide"
DIVLTQSPLSLPVTPGEPASISCRSSQSLLHSNGYNYLDWYLQKPGQSPQLLIYLGSNRASGVPDRFSGSGSGTDFTLKISRVEAEDVGVYYCMQALQTPLTFGGGTKVDIK

SEQ ID NO: 211 - protein, 110 aa, Artificial Sequence
  source: /note="Description of Artificial Sequence: Synthetic polypeptide"
EIVLTQSPGTLSLSPGERATLSCRASQSVSSSYLAWYQQKPGQAPRLLIYGTSSRATGISDRFSGSGSGTDFTLTISRLEPEDFAVYYCQHYGNSPPKFTFGPGTKLEIK

SEQ ID NO: 212 - protein, 109 aa, Artificial Sequence
  source: /note="Description of Artificial Sequence: Synthetic polypeptide"
EIVLTQSPGTLSLSPGERATLSCRASQSVASSFLAWYQQKPGQAPRLLIYGASGRATGIPDRFSGSGSGTDFTLTISRLEPEDFAVYYCQHYGGSPRLTFGGGTKVDIK

SEQ ID NO: 213 - protein, 487 aa, Artificial Sequence
  source: /note="Description of Artificial Sequence: Synthetic polypeptide"
MALPVTALLLPLALLLHAARPQVQLQESGPGLVKPSETLSLTCTVSGGSISSSYYYWGWIRQPPGKGLEWIGSIYYSGSAYYNPSLKSRVTISVDTSKNQFSLRLSSVTAADTAVYYCARHWQEWPDAFDIWGQGTMVTVSSGGGGSGGGGSGGGGSETTLTQSPAFMSATPGDKVIISCKASQDIDDAMNWYQQKPGEAPLFIIQSATSPVPGIPPRFSGSGFGTDFSLTINNIESEDAAYYFCLQHDNFPLTFGQGTKLEIKTTTPAPRPPTPAPTIASQPLSLRPEACRPAAGGAVHTRGLDFACDIYIWAPLAGTCGVLLLSLVITLYCKRGRKKLLYIFKQPFMRPVQTTQEEDGCSCRFPEEEEGGCELRVKFSRSADAPAYKQGQNQLYNELNLGRREEYDVLDKRRGRDPEMGGKPRRKNPQEGLYNELQKDKMAEAYSEIGMKGERRRGKGHDGLYQGLSTATKDTYDALHMQALPPR

SEQ ID NO: 214 - protein, 489 aa, Artificial Sequence
  source: /note="Description of Artificial Sequence: Synthetic polypeptide"
MALPVTALLLPLALLLHAARPQVNLRESGPALVKPTQTLTLTCTFSGFSLRTSGMCVSWIRQPPGKALEWLARIDWDEDKFYSTSLKTRLTISKDTSDNQVVLRMTNMDPADTATYYCARSGAGGTSATAFDIWGPGTMVTVSSGGGGSGGGGSGGGGSDIQMTQSPSSLSASVGDRVTITCRASQDIYNNLAWFQLKPGSAPRSLMYAANKSQSGVPSRFSGSASGTDFTLTISSLQPEDFATYYCQHYYRFPYSFGQGTKLEIKTTTPAPRPPTPAPTIASQPLSLRPEACRPAAGGAVHTRGLDFACDIYIWAPLAGTCGVLLLSLVITLYCKRGRKKLLYIFKQPFMRPVQTTQEEDGCSCRFPEEEEGGCELRVKFSRSADAPAYKQGQNQLYNELNLGRREEYDVLDKRRGRDPEMGGKPRRKNPQEGLYNELQKDKMAEAYSEIGMKGERRRGKGHDGLYQGLSTATKDTYDALHMQALPPR

SEQ ID NO: 215 - protein, 490 aa, Artificial Sequence
  source: /note="Description of Artificial Sequence: Synthetic polypeptide"
MALPVTALLLPLALLLHAARPEVQLVESGGGLVKPGGSLRLSCAASGFTFSSYSMNWVRQAPGKGLEWVSSISSSSSYIYYADSVKGRFTISRDNAKNSLYLQMNSLRAEDTAVYYCAKTIAAVYAFDIWGQGTTVTVSSGGGGSGGGGSGGGGSEIVLTQSPLSLPVTPEEPASISCRSSQSLLHSNGYNYLDWYLQKPGQSPQLLIYLGSNRASGVPDRFSGSGSGTDFTLKISRVEAEDVGVYYCMQALQTPYTFGQGTKLEIKTTTPAPRPPTPAPTIASQPLSLRPEACRPAAGGAVHTRGLDFACDIYIWAPLAGTCGVLLLSLVITLYCKRGRKKLLYIFKQPFMRPVQTTQEEDGCSCRFPEEEEGGCELRVKFSRSADAPAYKQGQNQLYNELNLGRREEYDVLDKRRGRDPEMGGKPRRKNPQEGLYNELQKDKMAEAYSEIGMKGERRRGKGHDGLYQGLSTATKDTYDALHMQALPPR

SEQ ID NO: 216 - protein, 484 aa, Artificial Sequence
  source: /note="Description of Artificial Sequence: Synthetic polypeptide"
MALPVTALLLPLALLLHAARPEVQLVESGGGLVKPGGSLRLSCAASGFTFSDYYMSWIRQAPGKGLEWVSYISSSGSTIYYADSVKGRFTISRDNAKNSLYLQMNSLRAEDTAVYYCARDLRGAFDIWGQGTMVTVSSGGGGSGGGGSGGGGSSYVLTQSPSVSAAPGYTATISCGGNNIGTKSVHWYQQKPGQAPLLVIRDDSVRPSKIPGRFSGSNSGNMATLTISGVQAGDEADFYCQVWDSDSEHVVFGGGTKLTVLTTTPAPRPPTPAPTIASQPLSLRPEACRPAAGGAVHTRGLDFACDIYIWAPLAGTCGVLLLSLVITLYCKRGRKKLLYIFKQPFMRPVQTTQEEDGCSCRFPEEEEGGCELRVKFSRSADAPAYKQGQNQLYNELNLGRREEYDVLDKRRGRDPEMGGKPRRKNPQEGLYNELQKDKMAEAYSEIGMKGERRRGKGHDGLYQGLSTATKDTYDALHMQALPPR

SEQ ID NO: 217 - protein, 485 aa, Artificial Sequence
  source: /note="Description of Artificial Sequence: Synthetic polypeptide"
MALPVTALLLPLALLLHAARPQVQLVQSGAEVKKPGASVKVSCKPSGYTVTSHYIHWVRRAPGQGLEWMGMINPSGGVTAYSQTLQGRVTMTSDTSSSTVYMELSSLRSEDTAMYYCAREGSGSGWYFDFWGRGTLVTVSSGGGGSGGGGSGGGGSSYVLTQPPSVSVSPGQTASITCSGDGLSKKYVSWYQQKAGQSPVVLISRDKERPSGIPDRFSGSNSADTATLTISGTQAMDEADYYCQAWDDTTVVFGGGTKLTVLTTTPAPRPPTPAPTIASQPLSLRPEACRPAAGGAVHTRGLDFACDIYIWAPLAGTCGVLLLSLVITLYCKRGRKKLLYIFKQPFMRPVQTTQEEDGCSCRFPEEEEGGCELRVKFSRSADAPAYKQGQNQLYNELNLGRREEYDVLDKRRGRDPEMGGKPRRKNPQEGLYNELQKDKMAEAYSEIGMKGERRRGKGHDGLYQGLSTATKDTYDALHMQALPPR

SEQ ID NO: 218 - protein, 489 aa, Artificial Sequence
  source: /note="Description of Artificial Sequence: Synthetic polypeptide"
MALPVTALLLPLALLLHAARPQVQLQESGPGLVKPSQTLSLTCTVSGGSISSGGYYWSWIRQHPGKGLEWIGYIYYSGSTYYNPSLKSRVTISVDTSKNQFSLKLSSVTAADTAVYYCARAGIAARLRGAFDIWGQGTMVTVSSGGGGSGGGGSGGGGSDIVMTQSPSSVSASVGDRVIITCRASQGIRNWLAWYQQKPGKAPNLLIYAASNLQSGVPSRFSGSGSGADFTLTISSLQPEDVATYYCQKYNSAPFTFGPGTKVDIKTTTPAPRPPTPAPTIASQPLSLRPEACRPAAGGAVHTRGLDFACDIYIWAPLAGTCGVLLLSLVITLYCKRGRKKLLYIFKQPFMRPVQTTQEEDGCSCRFPEEEEGGCELRVKFSRSADAPAYKQGQNQLYNELNLGRREEYDVLDKRRGRDPEMGGKPRRKNPQEGLYNELQKDKMAEAYSEIGMKGERRRGKGHDGLYQGLSTATKDTYDALHMQALPPR

SEQ ID NO: 219 - protein, 497 aa, Artificial Sequence
  source: /note="Description of Artificial Sequence: Synthetic polypeptide"
MALPVTALLLPLALLLHAARPQVQLVQSGAEVKKPGSSVKVSCKASGGTFSSYAISWVRQAPGQGLEWMGGIIPIFGTANYAQKFQGRVTITADESTSTAYMELSSLRSEDTAVYYCARRGGYQLLRWDVGLLRSAFDIWGQGTMVTVSSGGGGSGGGGSGGGGSSYVLTQPPSVSVAPGQTARITCGGNNIGSKSVHWYQQKPGQAPVLVLYGKNNRPSGVPDRFSGSRSGTTASLTITGAQAEDEADYYCSSRDSSGDHLRVFGTGTKVTVLTTTPAPRPPTPAPTIASQPLSLRPEACRPAAGGAVHTRGLDFACDIYIWAPLAGTCGVLLLSLVITLYCKRGRKKLLYIFKQPFMRPVQTTQEEDGCSCRFPEEEEGGCELRVKFSRSADAPAYKQGQNQLYNELNLGRREEYDVLDKRRGRDPEMGGKPRRKNPQEGLYNELQKDKMAEAYSEIGMKGERRRGKGHDGLYQGLSTATKDTYDALHMQALPPR

SEQ ID NO: 220 - protein, 492 aa, Artificial Sequence
  source: /note="Description of Artificial Sequence: Synthetic polypeptide"
MALPVTALLLPLALLLHAARPEVQLQQSGPGLVKPSQTLSLTCAISGDSVSSNSAAWNWIRQSPSRGLEWLGRTYYRSKWYSFYAISLKSRIIINPDTSKNQFSLQLKSVTPEDTAVYYCARSSPEGLFLYWFDPWGQGTLVTVSSGGDGSGGGGSGGGGSSSELTQDPAVSVALGQTIRITCQGDSLGNYYATWYQQKPGQAPVLVIYGTNNRPSGIPDRFSASSSGNTASLTITGAQAEDEADYYCNSRDSSGHHLLFGTGTKVTVLTTTPAPRPPTPAPTIASQPLSLRPEACRPAAGGAVHTRGLDFACDIYIWAPLAGTCGVLLLSLVITLYCKRGRKKLLYIFKQPFMRPVQTTQEEDGCSCRFPEEEEGGCELRVKFSRSADAPAYKQGQNQLYNELNLGRREEYDVLDKRRGRDPEMGGKPRRKNPQEGLYNELQKDKMAEAYSEIGMKGERRRGKGHDGLYQGLSTATKDTYDALHMQALPPR

SEQ ID NO: 221 - protein, 490 aa, Artificial Sequence
  source: /note="Description of Artificial Sequence: Synthetic polypeptide"
MALPVTALLLPLALLLHAARPEVQLVESGGGLVQPGGSLRLSCAASGFTFSSYAMSWVRQAPGKGLEWVSAISGSGGSTYYADSVKGRFTISRDNSKNTLYLQMNSLRAEDTAVYYCAKVEGSGSLDYWGQGTLVTVSSGGGGSGGGGSGGGGSEIVMTQSPGTLSLSPGERATLSCRASQSVSSAYLAWYQQKPGQPPRLLISGASTRATGIPDRFGGSGSGTDFTLTISRLEPEDFAVYYCQHYGSSFNGSSLFTFGQGTRLEIKTTTPAPRPPTPAPTIASQPLSLRPEACRPAAGGAVHTRGLDFACDIYIWAPLAGTCGVLLLSLVITLYCKRGRKKLLYIFKQPFMRPVQTTQEEDGCSCRFPEEEEGGCELRVKFSRSADAPAYKQGQNQLYNELNLGRREEYDVLDKRRGRDPEMGGKPRRKNPQEGLYNELQKDKMAEAYSEIGMKGERRRGKGHDGLYQGLSTATKDTYDALHMQALPPR

SEQ ID NO: 222 - protein, 485 aa, Artificial Sequence
  source: /note="Description of Artificial Sequence: Synthetic polypeptide"
MALPVTALLLPLALLLHAARPEVQLVETGGGLVQPGGSLRLSCAASGITFSRYPMSWVRQAPGKGLEWVSGISDSGVSTYYADSAKGRFTISRDNSKNTLFLQMSSLRDEDTAVYYCVTRAGSEASDIWGQGTMVTVSSGGGGSGGGGSGGGGSEIVLTQSPATLSLSPGERATLSCRASQSVSNSLAWYQQKPGQAPRLLIYDASSRATGIPDRFSGSGSGTDFTLTISRLEPEDFAIYYCQQFGTSSGLTFGGGTKLEIKTTTPAPRPPTPAPTIASQPLSLRPEACRPAAGGAVHTRGLDFACDIYIWAPLAGTCGVLLLSLVITLYCKRGRKKLLYIFKQPFMRPVQTTQEEDGCSCRFPEEEEGGCELRVKFSRSADAPAYKQGQNQLYNELNLGRREEYDVLDKRRGRDPEMGGKPRRKNPQEGLYNELQKDKMAEAYSEIGMKGERRRGKGHDGLYQGLSTATKDTYDALHMQALPPR

SEQ ID NO: 223 - protein, 492 aa, Artificial Sequence
  source: /note="Description of Artificial Sequence: Synthetic polypeptide"
MALPVTALLLPLALLLHAARPQVQLVESGGGLVQPGGSLRLSCAASGFTFSSYAMSWVRQAPGKGLEWVSAISGSGGSTYYADSVKGRFTISRDNAKNSLYLQMNSLRAEDTAIYYCARATYKRELRYYYGMDVWGQGTMVTVSSGGGGSGGGGSGGGGSEIVMTQSPGTVSLSPGERATLSCRASQSVSSSFLAWYQQKPGQAPRLLIYGASSRATGIPDRFSGSGSGTDFTLTISRLEPEDSAVYYCQQYHSSPSWTFGQGTRLEIKTTTPAPRPPTPAPTIASQPLSLRPEACRPAAGGAVHTRGLDFACDIYIWAPLAGTCGVLLLSLVITLYCKRGRKKLLYIFKQPFMRPVQTTQEEDGCSCRFPEEEEGGCELRVKFSRSADAPAYKQGQNQLYNELNLGRREEYDVLDKRRGRDPEMGGKPRRKNPQEGLYNELQKDKMAEAYSEIGMKGERRRGKGHDGLYQGLSTATKDTYDALHMQALPPR

SEQ ID NO: 224 - protein, 492 aa, Artificial Sequence
  source: /note="Description of Artificial Sequence: Synthetic polypeptide"
MALPVTALLLPLALLLHAARPEVQLVETGGGLVQPGGSLRLSCAASGFTFSSYAMSWVRQAPGKGLEWVSAISGSGGSTYYADSVKGRFTISRDNSKNTLYLQMNTLKAEDTAVYYCARATYKRELRYYYGMDVWGQGTTVTVSSGGGGSGGGGSGGGGSEIVLTQSPSTLSLSPGESATLSCRASQSVSTTFLAWYQQKPGQAPRLLIYGSSNRATGIPDRFSGSGSGTDFTLTIRRLEPEDFAVYYCQQYHSSPSWTFGQGTKVEIKTTTPAPRPPTPAPTIASQPLSLRPEACRPAAGGAVHTRGLDFACDIYIWAPLAGTCGVLLLSLVITLYCKRGRKKLLYIFKQPFMRPVQTTQEEDGCSCRFPEEEEGGCELRVKFSRSADAPAYKQGQNQLYNELNLGRREEYDVLDKRRGRDPEMGGKPRRKNPQEGLYNELQKDKMAEAYSEIGMKGERRRGKGHDGLYQGLSTATKDTYDALHMQALPPR

SEQ ID NO: 225 - protein, 483 aa, Artificial Sequence
  source: /note="Description of Artificial Sequence: Synthetic polypeptide"
MALPVTALLLPLALLLHAARPEVQLVETGGGLVQPGRSLRLSCAASGFTFDDYAMHWVRQAPGKGLEWVSGISWNSGSIGYADSVKGRFTISRDNAKNSLYLQMNSLRDEDTAVYYCARVGKAVPDVWGQGTTVTVSSGGGGSGGGGSGGGGSDIVMTQTPSSLSASVGDRVTITCRASQSISSYLNWYQQKPGKAPKLLIYAASSLQSGVPSRFSGSGSGTDFTLTISSLQPEDFATYYCQQSYSTPYSFGQGTRLEIKTTTPAPRPPTPAPTIASQPLSLRPEACRPAAGGAVHTRGLDFACDIYIWAPLAGTCGVLLLSLVITLYCKRGRKKLLYIFKQPFMRPVQTTQEEDGCSCRFPEEEEGGCELRVKFSRSADAPAYKQGQNQLYNELNLGRREEYDVLDKRRGRDPEMGGKPRRKNPQEGLYNELQKDKMAEAYSEIGMKGERRRGKGHDGLYQGLSTATKDTYDALHMQALPPR

SEQ ID NO: 226 - protein, 490 aa, Artificial Sequence
  source: /note="Description of Artificial Sequence: Synthetic polypeptide"
MALPVTALLLPLALLLHAARPEVQLVESGGGLVQPGRSLRLSCTASGFTFDDYAMHWVRQRPGKGLEWVASINWKGNSLAYGDSVKGRFAISRDNAKNTVFLQMNSLRTEDTAVYYCASHQGVAYYNYAMDVWGRGTLVTVSSGGGGSGGGGSGGGGSEIVLTQSPGTLSLSPGERATLSCRATQSIGSSFLAWYQQRPGQAPRLLIYGASQRATGIPDRFSGRGSGTDFTLTISRVEPEDSAVYYCQHYESSPSWTFGQGTKVEIKTTTPAPRPPTPAPTIASQPLSLRPEACRPAAGGAVHTRGLDFACDIYIWAPLAGTCGVLLLSLVITLYCKRGRKKLLYIFKQPFMRPVQTTQEEDGCSCRFPEEEEGGCELRVKFSRSADAPAYKQGQNQLYNELNLGRREEYDVLDKRRGRDPEMGGKPRRKNPQEGLYNELQKDKMAEAYSEIGMKGERRRGKGHDGLYQGLSTATKDTYDALHMQALPPR

SEQ ID NO: 227 - protein, 485 aa, Artificial Sequence
  source: /note="Description of Artificial Sequence: Synthetic polypeptide"
MALPVTALLLPLALLLHAARPEVQLVESGGGLVQPGGSLRLSCAASGFTFSSYAMSWVRQAPGKGLEWVSAISGSGGSTYYADSVKGRFTISRDNSKNTLYLQMNSLRAEDTAVYYCAKVVRDGMDVWGQGTTVTVSSGGGGSGGGGSGGGGSEIVLTQSPATLSLSPGERATLSCRASQSVSSSYLAWYQQKPGQAPRLLIYGASSRATGIPDRFSGNGSGTDFTLTISRLEPEDFAVYYCQQYGSPPRFTFGPGTKVDIKTTTPAPRPPTPAPTIASQPLSLRPEACRPAAGGAVHTRGLDFACDIYIWAPLAGTCGVLLLSLVITLYCKRGRKKLLYIFKQPFMRPVQTTQEEDGCSCRFPEEEEGGCELRVKFSRSADAPAYKQGQNQLYNELNLGRREEYDVLDKRRGRDPEMGGKPRRKNPQEGLYNELQKDKMAEAYSEIGMKGERRRGKGHDGLYQGLSTATKDTYDALHMQALPPR

SEQ ID NO: 228 - protein, 486 aa, Artificial Sequence
  source: /note="Description of Artificial Sequence: Synthetic polypeptide"
MALPVTALLLPLALLLHAARPEVQLLESGGGLVQPGGSLRLSCAASGFTFSSYAMSWVRQAPGKGLEWVSAISGSGGSTYYADSVKGRFTISRDNSKNTLYLQMNSLRAEDTAVYYCAKIPQTGTFDYWGQGTLVTVSSGGGGSGGGGSGGGGSEIVLTQSPGTLSLSPGERATLSCRASQSVSSSYLAWYQQRPGQAPRLLIYGASSRATGIPDRFSGSGSGTDFTLTISRLEPEDFAVYYCQHYGSSPSWTFGQGTRLEIKTTTPAPRPPTPAPTIASQPLSLRPEACRPAAGGAVHTRGLDFACDIYIWAPLAGTCGVLLLSLVITLYCKRGRKKLLYIFKQPFMRPVQTTQEEDGCSCRFPEEEEGGCELRVKFSRSADAPAYKQGQNQLYNELNLGRREEYDVLDKRRGRDPEMGGKPRRKNPQEGLYNELQKDKMAEAYSEIGMKGERRRGKGHDGLYQGLSTATKDTYDALHMQALPPR

SEQ ID NO: 229 - protein, 492 aa, Artificial Sequence
  source: /note="Description of Artificial Sequence: Synthetic polypeptide"
MALPVTALLLPLALLLHAARPEVQLVETGGGLVQPGGSLRLSCAASGFTFSSYAMSWVRQAPGKGLEWVSAISGSGGSTYYADSVKGRFTMSRENDKNSVFLQMNSLRVEDTGVYYCARANYKRELRYYYGMDVWGQGTMVTVSSGGGGSGGGGSGGGGSEIVMTQSPGTLSLSPGESATLSCRASQRVASNYLAWYQHKPGQAPSLLISGASSRATGVPDRFSGSGSGTDFTLAISRLEPEDSAVYYCQHYDSSPSWTFGQGTKVEIKTTTPAPRPPTPAPTIASQPLSLRPEACRPAAGGAVHTRGLDFACDIYIWAPLAGTCGVLLLSLVITLYCKRGRKKLLYIFKQPFMRPVQTTQEEDGCSCRFPEEEEGGCELRVKFSRSADAPAYKQGQNQLYNELNLGRREEYDVLDKRRGRDPEMGGKPRRKNPQEGLYNELQKDKMAEAYSEIGMKGERRRGKGHDGLYQGLSTATKDTYDALHMQALPPR

SEQ ID NO: 230 - protein, 488 aa, Artificial Sequence
  source: /note="Description of Artificial Sequence: Synthetic polypeptide"
MALPVTALLLPLALLLHAARPEVQLLETGGGLVQPGGSLRLSCAASGFSFSSYAMSWVRQAPGKGLEWVSAISGSGGSTYYADSVKGRFTISRDNSKNTLYLQMNSLRAEDTAVYYCAKALVGATGAFDIWGQGTLVTVSSGGGGSGGGGSGGGGSEIVLTQSPGTLSLSPGERATLSCRASQSLSSNFLAWYQQKPGQAPGLLIYGASNWATGTPDRFSGSGSGTDFTLTITRLEPEDFAVYYCQYYGTSPMYTFGQGTKVEIKTTTPAPRPPTPAPTIASQPLSLRPEACRPAAGGAVHTRGLDFACDIYIWAPLAGTCGVLLLSLVITLYCKRGRKKLLYIFKQPFMRPVQTTQEEDGCSCRFPEEEEGGCELRVKFSRSADAPAYKQGQNQLYNELNLGRREEYDVLDKRRGRDPEMGGKPRRKNPQEGLYNELQKDKMAEAYSEIGMKGERRRGKGHDGLYQGLSTATKDTYDALHMQALPPR

SEQ ID NO: 231 - protein, 488 aa, Artificial Sequence
  source: /note="Description of Artificial Sequence: Synthetic polypeptide"
MALPVTALLLPLALLLHAARPEVQLLESGGGLVQPGGSLRLSCAASGFTFSSYAMSWVRQAPGKGLEWVSAISGSGGSTYYADSVKGRFTISRDNSKNTLYLQMNSLRAEDTAVYYCVLWFGEGFDPWGQGTLVTVSSGGGGSGGGGSGGGGSDIVLTQSPLSLPVTPGEPASISCRSSQSLLHSNGYNYLDWYLQKPGQSPQLLIYLGSNRASGVPDRFSGSGSGTDFTLKISRVEAEDVGVYYCMQALQTPLTFGGGTKVDIKTTTPAPRPPTPAPTIASQPLSLRPEACRPAAGGAVHTRGLDFACDIYIWAPLAGTCGVLLLSLVITLYCKRGRKKLLYIFKQPFMRPVQTTQEEDGCSCRFPEEEEGGCELRVKFSRSADAPAYKQGQNQLYNELNLGRREEYDVLDKRRGRDPEMGGKPRRKNPQEGLYNELQKDKMAEAYSEIGMKGERRRGKGHDGLYQGLSTATKDTYDALHMQALPPR

SEQ ID NO: 232 - protein, 495 aa, Artificial Sequence
  source: /note="Description of Artificial Sequence: Synthetic polypeptide"
MALPVTALLLPLALLLHAARPQVQLVESGGGLVQPGGSLRLSCAASGFTFSSYAMSWVRQAPGKGLEWVSAISGSGGSTYYADSVKGRFTISRDNSKNTLYLQMNSLRAEDTAVYYCAKVGYDSSGYYRDYYGMDVWGQGTTVTVSSGGGGSGGGGSGGGGSEIVLTQSPGTLSLSPGERATLSCRASQSVSSSYLAWYQQKPGQAPRLLIYGTSSRATGISDRFSGSGSGTDFTLTISRLEPEDFAVYYCQHYGNSPPKFTFGPGTKLEIKTTTPAPRPPTPAPTIASQPLSLRPEACRPAAGGAVHTRGLDFACDIYIWAPLAGTCGVLLLSLVITLYCKRGRKKLLYIFKQPFMRPVQTTQEEDGCSCRFPEEEEGGCELRVKFSRSADAPAYKQGQNQLYNELNLGRREEYDVLDKRRGRDPEMGGKPRRKNPQEGLYNELQKDKMAEAYSEIGMKGERRRGKGHDGLYQGLSTATKDTYDALHMQALPPR

SEQ ID NO: 233 - protein, 490 aa, Artificial Sequence
  source: /note="Description of Artificial Sequence: Synthetic polypeptide"
MALPVTALLLPLALLLHAARPEVQLVESGGGLVQPGGSLRLSCAASGFTFSSYAMSWVRQAPGKGLEWVSAISGSGGSTYYADSVKGRFTISRDNSKNTLYLQMNSLRAEDTAVYYCAKMGWSSGYLGAFDIWGQGTTVTVSSGGGGSGGGGSGGGGSEIVLTQSPGTLSLSPGERATLSCRASQSVASSFLAWYQQKPGQAPRLLIYGASGRATGIPDRFSGSGSGTDFTLTISRLEPEDFAVYYCQHYGGSPRLTFGGGTKVDIKTTTPAPRPPTPAPTIASQPLSLRPEACRPAAGGAVHTRGLDFACDIYIWAPLAGTCGVLLLSLVITLYCKRGRKKLLYIFKQPFMRPVQTTQEEDGCSCRFPEEEEGGCELRVKFSRSADAPAYKQGQNQLYNELNLGRREEYDVLDKRRGRDPEMGGKPRRKNPQEGLYNELQKDKMAEAYSEIGMKGERRRGKGHDGLYQGLSTATKDTYDALHMQALPPR

SEQ ID NO: 234 - DNA, 1461 bp, Artificial Sequence
  source: /note="Description of Artificial Sequence: Synthetic polynucleotide"
atggccctccctgtcaccgccctgctgcttccgctggctcttctgctccacgccgctcggccccaagtgcagcttcaggaaagcggaccgggcctggtcaagccatccgaaactctctccctgacttgcactgtgtctggcggttccatctcatcgtcgtactactactggggctggattaggcagccgcccggaaagggactggagtggatcggaagcatctactattccggctcggcgtactacaaccctagcctcaagtcgagagtgaccatctccgtggatacctccaagaaccagttttccctgcgcctgagctccgtgaccgccgctgacaccgccgtgtactactgtgctcggcattggcaggaatggcccgatgccttcgacatttggggccagggcactatggtcactgtgtcatccgggggtggaggcagcgggggaggagggtccggggggggaggttcagagacaaccttgacccagtcacccgcattcatgtccgccactccgggagacaaggtcatcatctcgtgcaaagcgtcccaggatatcgacgatgccatgaattggtaccagcagaagcctggcgaagcgccgctgttcattatccaatccgcaacctcgcccgtgcctggaatcccaccgcggttcagcggcagcggtttcggaaccgacttttccctgaccattaacaacattgagtccgaggacgccgcctactacttctgcctgcaacacgacaacttccctctcacgttcggccagggaaccaagctggaaatcaagaccactaccccagcaccgaggccacccaccccggctcctaccatcgcctcccagcctctgtccctgcgtccggaggcatgtagacccgcagctggtggggccgtgcatacccggggtcttgacttcgcctgcgatatctacatttgggcccctctggctggtacttgcggggtcctgctgctttcactcgtgatcactctttactgtaagcgcggtcggaagaagctgctgtacatctttaagcaacccttcatgaggcctgtgcagactactcaagaggaggacggctgttcatgccggttcccagaggaggaggaaggcggctgcgaactgcgcgtgaaattcagccgcagcgcagatgctccagcctacaagcaggggcagaaccagctctacaacgaactcaatcttggtcggagagaggagtacgacgtgctggacaagcggagaggacgggacccagaaatgggcgggaagccgcgcagaaagaatccccaagagggcctgtacaacgagctccaaaaggataagatggcagaagcctatagcgagattggtatgaaaggggaacgcagaagaggcaaaggccacgacggactgtaccagggactcagcaccgccaccaaggacacctatgacgctcttcacatgcaggccctgccgcctcgg

SEQ ID NO: 235 - DNA, 1467 bp, Artificial Sequence
  source: /note="Description of Artificial Sequence: Synthetic polynucleotide"
atggccctccctgtcaccgccctgctgcttccgctggctcttctgctccacgccgctcggccccaagtcaatctgcgcgaatccggccccgccttggtcaagcctacccagaccctcactctgacctgtactttctccggcttctccctgcggacttccgggatgtgcgtgtcctggatcagacagcctccgggaaaggccctggagtggctcgctcgcattgactgggatgaggacaagttctactccacctcactcaagaccaggctgaccatcagcaaagatacctctgacaaccaagtggtgctccgcatgaccaacatggacccagccgacactgccacttactactgcgcgaggagcggagcgggcggaacctccgccaccgccttcgatatttggggcccgggtaccatggtcaccgtgtcaagcggaggaggggggtccgggggcggcggttccgggggaggcggatcggacattcagatgactcagtcaccatcgtccctgagcgctagcgtgggcgacagagtgacaatcacttgccgggcatcccaggacatctataacaaccttgcgtggttccagctgaagcctggttccgcaccgcggtcacttatgtacgccgccaacaagagccagtcgggagtgccgtcccggttttccggttcggcctcgggaactgacttcaccctgacgatctccagcctgcaacccgaggatttcgccacctactactgccagcactactaccgctttccctactcgttcggacagggaaccaagctggaaatcaagaccactaccccagcaccgaggccacccaccccggctcctaccatcgcctcccagcctctgtccctgcgtccggaggcatgtagacccgcagctggtggggccgtgcatacccggggtcttgacttcgcctgcgatatctacatttgggcccctctggctggtacttgcggggtcctgctgctttcactcgtgatcactctttactgtaagcgcggtcggaagaagctgctgtacatctttaagcaacccttcatgaggcctgtgcagactactcaagaggaggacggctgttcatgccggttcccagaggaggaggaaggcggctgcgaactgcgcgtgaaattcagccgcagcgcagatgctccagcctacaagcaggggcagaaccagctctacaacgaactcaatcttggtcggagagaggagtacgacgtgctggacaagcggagaggacgggacccagaaatgggcgggaagccgcgcagaaagaatccccaagagggcctgtacaacgagctccaaaaggataagatggcagaagcctatagcgagattggtatgaaaggggaacgcagaagaggcaaaggccacgacggactgtaccagggactcagcaccgccaccaaggacacctatgacgctcttcacatgcaggccctgccgcctcgg

SEQ ID NO: 236 - DNA, 1470 bp, Artificial Sequence
  source: /note="Description of Artificial Sequence: Synthetic polynucleotide"
atggccctccctgtcaccgccctgctgcttccgctggctcttctgctccacgccgctcggcccgaagtgcagcttgtcgaatccggggggggactggtcaagccgggcggatcactgagactgtcctgcgccgcgagcggcttcacgttctcctcctactccatgaactgggtccgccaagcccccgggaagggactggaatgggtgtcctctatctcctcgtcgtcgtcctacatctactacgccgactccgtgaagggaagattcaccatttcccgcgacaacgcaaagaactcactgtacttgcaaatgaactcactccgggccgaagatactgctgtgtactattgcgccaagactattgccgccgtctacgctttcgacatctggggccagggaaccaccgtgactgtgtcgtccggtggtggtggctcgggcggaggaggaagcggcggcggggggtccgagattgtgctgacccagtcgccactgagcctccctgtgacccccgaggaacccgccagcatcagctgccggtccagccagtccctgctccactccaacggatacaattacctcgattggtaccttcagaagcctggacaaagcccgcagctgctcatctacttgggatcaaaccgcgcgtcaggagtgcctgaccggttctccggctcgggcagcggtaccgatttcaccctgaaaatctccagggtggaggcagaggacgtgggagtgtattactgtatgcaggcgctgcagactccgtacacatttgggcagggcaccaagctggagatcaagaccactaccccagcaccgaggccacccaccccggctcctaccatcgcctcccagcctctgtccctgcgtccggaggcatgtagacccgcagctggtggggccgtgcatacccggggtcttgacttcgcctgcgatatctacatttgggcccctctggctggtacttgcggggtcctgctgctttcactcgtgatcactctttactgtaagcgcggtcggaagaagctgctgtacatctttaagcaacccttcatgaggcctgtgcagactactcaagaggaggacggctgttcatgccggttcccagaggaggaggaaggcggctgcgaactgcgcgtgaaattcagccgcagcgcagatgctccagcctacaagcaggggcagaaccagctctacaacgaactcaatcttggtcggagagaggagtacgacgtgctggacaagcggagaggacgggacccagaaatgggcgggaagccgcgcagaaagaatccccaagagggcctgtacaacgagctccaaaaggataagatggcagaagcctatagcgagattggtatgaaaggggaacgcagaagaggcaaaggccacgacggactgtaccagggactcagcaccgccaccaaggacacctatgacgctcttcacatgcaggccctgccgcctcgg

SEQ ID NO: 237 - DNA, 1452 bp, Artificial Sequence
  source: /note="Description of Artificial Sequence: Synthetic polynucleotide"
atggccctccctgtcaccgccctgctgcttccgctggctcttctgctccacgccgctcggcccgaagtccagctcgtggagtccggcggaggccttgtgaagcctggaggttcgctgagactgtcctgcgccgcctccggcttcaccttctccgactactacatgtcctggatcagacaggccccgggaaagggcctggaatgggtgtcctacatctcgtcatcgggcagcactatctactacgcggactcagtgaaggggcggttcaccatttcccgggataacgcgaagaactcgctgtatctgcaaatgaactcactgagggccgaggacaccgccgtgtactactgcgcccgcgatctccgcggggcatttgacatctggggacagggaaccatggtcacagtgtccagcggagggggaggatcgggtggcggaggttccgggggtggaggctcctcctacgtgctgactcagagcccaagcgtcagcgctgcgcccggttacacggcaaccatctcctgtggcggaaacaacattgggaccaagtctgtgcactggtatcagcagaagccgggccaagctcccctgttggtgatccgcgatgactccgtgcggcctagcaaaattccgggacggttctccggctccaacagcggcaatatggccactctcaccatctcgggagtgcaggccggagatgaagccgacttctactgccaagtctgggactcagactccgagcatgtggtgttcgggggcggaaccaagctgactgtgctcaccactaccccagcaccgaggccacccaccccggctcctaccatcgcctcccagcctctgtccctgcgtccggaggcatgtagacccgcagctggtggggccgtgcatacccggggtcttgacttcgcctgcgatatctacatttgggcccctctggctggtacttgcggggtcctgctgctttcactcgtgatcactctttactgtaagcgcggtcggaagaagctgctgtacatctttaagcaacccttcatgaggcctgtgcagactactcaagaggaggacggctgttcatgccggttcccagaggaggaggaaggcggctgcgaactgcgcgtgaaattcagccgcagcgcagatgctccagcctacaagcaggggcagaaccagctctacaacgaactcaatcttggtcggagagaggagtacgacgtgctggacaagcggagaggacgggacccagaaatgggcgggaagccgcgcagaaagaatccccaagagggcctgtacaacgagctccaaaaggataagatggcagaagcctatagcgagattggtatgaaaggggaacgcagaagaggcaaaggccacgacggactgtaccagggactcagcaccgccaccaaggacacctatgacgctcttcacatgcaggccctgccgcctcgg

SEQ ID NO: 238 - DNA, 1455 bp, Artificial Sequence
  source: /note="Description of Artificial Sequence: Synthetic polynucleotide"
atggccctccctgtcaccgccctgctgcttccgctggctcttctgctccacgccgctcggccccaagtgcagctggtgcagagcggggccgaagtcaagaagccgggagcctccgtgaaagtgtcctgcaagccttcgggatacaccgtgacctcccactacattcattgggtccgccgcgcccccggccaaggactcgagtggatgggcatgatcaaccctagcggcggagtgaccgcgtacagccagacgctgcagggacgcgtgactatgacctcggatacctcctcctccaccgtctatatggaactgtccagcctgcggtccgaggataccgccatgtactactgcgcccgggaaggatcaggctccgggtggtatttcgacttctggggaagaggcaccctcgtgactgtgtcatctgggggagggggttccggtggtggcggatcgggaggaggcggttcatcctacgtgctgacccagccaccctccgtgtccgtgagccccggccagactgcatcgattacatgtagcggcgacggcctctccaagaaatacgtgtcgtggtaccagcagaaggccggacagagcccggtggtgctgatctcaagagataaggagcggcctagcggaatcccggacaggttctcgggttccaactccgcggacactgctactctgaccatctcggggacccaggctatggacgaagccgattactactgccaagcctgggacgacactactgtcgtgtttggagggggcaccaagttgaccgtccttaccactaccccagcaccgaggccacccaccccggctcctaccatcgcctcccagcctctgtccctgcgtccggaggcatgtagacccgcagctggtggggccgtgcatacccggggtcttgacttcgcctgcgatatctacatttgggcccctctggctggtacttgcggggtcctgctgctttcactcgtgatcactctttactgtaagcgcggtcggaagaagctgctgtacatctttaagcaacccttcatgaggcctgtgcagactactcaagaggaggacggctgttcatgccggttcccagaggaggaggaaggcggctgcgaactgcgcgtgaaattcagccgcagcgcagatgctccagcctacaagcaggggcagaaccagctctacaacgaactcaatcttggtcggagagaggagtacgacgtgctggacaagcggagaggacgggacccagaaatgggcgggaagccgcgcagaaagaatccccaagagggcctgtacaacgagctccaaaaggataagatggcagaagcctatagcgagattggtatgaaaggggaacgcagaagaggcaaaggccacgacggactgtaccagggactcagcaccgccaccaaggacacctatgacgctcttcacatgcaggccctgccgcctcgg

SEQ ID NO: 239 - DNA, 1467 bp, Artificial Sequence
  source: /note="Description of Artificial Sequence: Synthetic polynucleotide"
atggccctccctgtcaccgccctgctgcttccgctggctcttctgctccacgccgctcggccccaagtgcagcttcaggagagcggcccgggactcgtgaagccgtcccagaccctgtccctgacttgcaccgtgtcgggaggaagcatctcgagcggaggctactattggtcgtggattcggcagcaccctggaaagggcctggaatggatcggctacatctactactccggctcgacctactacaacccatcgctgaagtccagagtgacaatctcagtggacacgtccaagaatcagttcagcctgaagctctcttccgtgactgcggccgacaccgccgtgtactactgcgcacgcgctggaattgccgcccggctgaggggtgccttcgacatttggggacagggcaccatggtcaccgtgtcctccggcggcggaggttccgggggtggaggctcaggaggaggggggtccgacatcgtcatgactcagtcgccctcaagcgtcagcgcgtccgtcggggacagagtgatcatcacctgtcgggcgtcccagggaattcgcaactggctggcctggtatcagcagaagcccggaaaggcccccaacctgttgatctacgccgcctcaaacctccaatccggggtgccgagccgcttcagcggctccggttcgggtgccgatttcactctgaccatctcctccctgcaacctgaagatgtggctacctactactgccaaaagtacaactccgcaccttttactttcggaccggggaccaaagtggacattaagaccactaccccagcaccgaggccacccaccccggctcctaccatcgcctcccagcctctgtccctgcgtccggaggcatgtagacccgcagctggtggggccgtgcatacccggggtcttgacttcgcctgcgatatctacatttgggcccctctggctggtacttgcggggtcctgctgctttcactcgtgatcactctttactgtaagcgcggtcggaagaagctgctgtacatctttaagcaacccttcatgaggcctgtgcagactactcaagaggaggacggctgttcatgccggttcccagaggaggaggaaggcggctgcgaactgcgcgtgaaattcagccgcagcgcagatgctccagcctacaagcaggggcagaaccagctctacaacgaactcaatcttggtcggagagaggagtacgacgtgctggacaagcggagaggacgggacccagaaatgggcgggaagccgcgcagaaagaatccccaagagggcctgtacaacgagctccaaaaggataagatggcagaagcctatagcgagattggtatgaaaggggaacgcagaagaggcaaaggccacgacggactgtaccagggactcagcaccgccaccaaggacacctatgacgctcttcacatgcaggccctgccgcctcgg

SEQ ID NO: 240 - DNA, 1491 bp, Artificial Sequence
  source: /note="Description of Artificial Sequence: Synthetic polynucleotide"
atggccctccctgtcaccgccctgctgcttccgctggctcttctgctccacgccgctcggccccaagtgcagctggtccagtcgggcgccgaggtcaagaagcccgggagctctgtgaaagtgtcctgcaaggcctccgggggcacctttagctcctacgccatctcctgggtccgccaagcaccgggtcaaggcctggagtggatggggggaattatccctatcttcggcactgccaactacgcccagaagttccagggacgcgtgaccattaccgcggacgaatccacctccaccgcttatatggagctgtccagcttgcgctcggaagataccgccgtgtactactgcgcccggaggggtggataccagctgctgagatgggacgtgggcctcctgcggtcggcgttcgacatctggggccagggcactatggtcactgtgtccagcggaggaggcggatcgggaggcggcggatcagggggaggcggttccagctacgtgcttactcaacccccttcggtgtccgtggccccgggacagaccgccagaatcacttgcggaggaaacaacattgggtccaagagcgtgcattggtaccagcagaagccaggacaggcccctgtgctggtgctctacgggaagaacaatcggcccagcggagtgccggacaggttctcgggttcacgctccggtacaaccgcttcactgactatcaccggggcccaggcagaggatgaagcggactactactgttcctcccgggattcatccggcgaccacctccgggtgttcggaaccggaacgaaggtcaccgtgctgaccactaccccagcaccgaggccacccaccccggctcctaccatcgcctcccagcctctgtccctgcgtccggaggcatgtagacccgcagctggtggggccgtgcatacccggggtcttgacttcgcctgcgatatctacatttgggcccctctggctggtacttgcggggtcctgctgctttcactcgtgatcactctttactgtaagcgcggtcggaagaagctgctgtacatctttaagcaacccttcatgaggcctgtgcagactactcaagaggaggacggctgttcatgccggttcccagaggaggaggaaggcggctgcgaactgcgcgtgaaattcagccgcagcgcagatgctccagcctacaagcaggggcagaaccagctctacaacgaactcaatcttggtcggagagaggagtacgacgtgctggacaagcggagaggacgggacccagaaatgggcgggaagccgcgcagaaagaatccccaagagggcctgtacaacgagctccaaaaggataagatggcagaagcctatagcgagattggtatgaaaggggaacgcagaagaggcaaaggccacgacggactgtaccagggactcagcaccgccaccaaggacacctatgacgctcttcacatgcaggccctgccgcctcgg

SEQ ID NO: 241 - DNA, 1476 bp, Artificial Sequence
  source: /note="Description of Artificial Sequence: Synthetic polynucleotide"
atggccctccctgtcaccgccctgctgcttccgctggctcttctgctccacgccgctcggcccgaagtgcagctccaacagtcaggaccggggctcgtgaagccatcccagaccctgtccctgacttgtgccatctcgggagatagcgtgtcatcgaactccgccgcctggaactggattcggcagagcccgtcccgcggactggagtggcttggaaggacctactaccggtccaagtggtactctttctacgcgatctcgctgaagtcccgcattatcattaaccctgatacctccaagaatcagttctccctccaactgaaatccgtcacccccgaggacacagcagtgtattactgcgcacggagcagccccgaaggactgttcctgtattggtttgacccctggggccaggggactcttgtgaccgtgtcgagcggcggagatgggtccggtggcggtggttcggggggcggcggatcatcatccgaactgacccaggacccggctgtgtccgtggcgctgggacaaaccatccgcattacgtgccagggagactccctgggcaactactacgccacttggtaccagcagaagccgggccaagcccctgtgttggtcatctacgggaccaacaacagaccttccggcatccccgaccggttcagcgcttcgtcctccggcaacactgccagcctgaccatcactggagcgcaggccgaagatgaggccgactactactgcaacagcagagactcctcgggtcatcacctcttgttcggaactggaaccaaggtcaccgtgctgaccactaccccagcaccgaggccacccaccccggctcctaccatcgcctcccagcctctgtccctgcgtccggaggcatgtagacccgcagctggtggggccgtgcatacccggggtcttgacttcgcctgcgatatctacatttgggcccctctggctggtacttgcggggtcctgctgctttcactcgtgatcactctttactgtaagcgcggtcggaagaagctgctgtacatctttaagcaacccttcatgaggcctgtgcagactactcaagaggaggacggctgttcatgccggttcccagaggaggaggaaggcggctgcgaactgcgcgtgaaattcagccgcagcgcagatgctccagcctacaagcaggggcagaaccagctctacaacgaactcaatcttggtcggagagaggagtacgacgtgctggacaagcggagaggacgggacccagaaatgggcgggaagccgcgcagaaagaatccccaagagggcctgtacaacgagctccaaaaggataagatggcagaagcctatagcgagattggtatgaaaggggaacgcagaagaggcaaaggccacgacggactgtaccagggactcagcaccgccaccaaggacacctatgacgctcttcacatgcaggccctgccgcctcgg

SEQ ID NO: 242 - DNA, 1470 bp, Artificial Sequence
  source: /note="Description of Artificial Sequence: Synthetic polynucleotide"
atggccctccctgtcaccgccctgctgcttccgctggctcttctgctccacgccgctcggcccgaagtgcagctcgtggagtcaggaggcggcctggtccagccgggagggtcccttagactgtcatgcgccgcaagcggattcactttctcctcctatgccatgagctgggtccgccaagcccccggaaagggactggaatgggtgtccgccatctcggggtctggaggctcaacttactacgctgactccgtgaagggacggttcaccattagccgcgacaactccaagaacaccctctacctccaaatgaactccctgcgggccgaggataccgccgtctactactgcgccaaagtggaaggttcaggatcgctggactactggggacagggtactctcgtgaccgtgtcatcgggcggaggaggttccggcggtggcggctccggcggcggagggtcggagatcgtgatgacccagagccctggtactctgagcctttcgccgggagaaagggccaccctgtcctgccgcgcttcccaatccgtgtcctccgcgtacttggcgtggtaccagcagaagccgggacagccccctcggctgctgatcagcggggccagcacccgggcaaccggaatcccagacagattcgggggttccggcagcggcacagatttcaccctgactatttcgaggttggagcccgaggactttgcggtgtattactgtcagcactacgggtcgtcctttaatggctccagcctgttcacgttcggacaggggacccgcctggaaatcaagaccactaccccagcaccgaggccacccaccccggctcctaccatcgcctcccagcctctgtccctgcgtccggaggcatgtagacccgcagctggtggggccgtgcatacccggggtcttgacttcgcctgcgatatctacatttgggcccctctggctggtacttgcggggtcctgctgctttcactcgtgatcactctttactgtaagcgcggtcggaagaagctgctgtacatctttaagcaacccttcatgaggcctgtgcagactactcaagaggaggacggctgttcatgccggttcccagaggaggaggaaggcggctgcgaactgcgcgtgaaattcagccgcagcgcagatgctccagcctacaagcaggggcagaaccagctctacaacgaactcaatcttggtcggagagaggagtacgacgtgctggacaagcggagaggacgggacccagaaatgggcgggaagccgcgcagaaagaatccccaagagggcctgtacaacgagctccaaaaggataagatggcagaagcctatagcgagattggtatgaaaggggaacgcagaagaggcaaaggccacgacggactgtaccagggactcagcaccgccaccaaggacacctatgacgctcttcacatgcaggccctgccgcctcgg

SEQ ID NO: 243 - DNA, 1455 bp, Artificial Sequence
  source: /note="Description of Artificial Sequence: Synthetic polynucleotide"
atggccctccctgtcaccgccctgctgcttccgctggctcttctgctccacgccgctcggcccgaagtgcaactggtggaaaccggtggcggcctggtgcagcctggaggatcattgaggctgtcatgcgcggccagcggtattaccttctcccggtaccccatgtcctgggtcagacaggccccggggaaagggcttgaatgggtgtccgggatctcggactccggtgtcagcacttactacgccgactccgccaagggacgcttcaccatttcccgggacaactcgaagaacaccctgttcctccaaatgagctccctccgggacgaggatactgcagtgtactactgcgtgacccgcgccgggtccgaggcgtctgacatttggggacagggcactatggtcaccgtgtcgtccggcggagggggctcgggaggcggtggcagcggaggaggagggtccgagatcgtgctgacccaatccccggccaccctctcgctgagccctggagaaagggcaaccttgtcctgtcgcgcgagccagtccgtgagcaactccctggcctggtaccagcagaagcccggacaggctccgagacttctgatctacgacgcttcgagccgggccactggaatccccgaccgcttttcggggtccggctcaggaaccgatttcaccctgacaatctcacggctggagccagaggatttcgccatctattactgccagcagttcggtacttcctccggcctgactttcggaggcggcacgaagctcgaaatcaagaccactaccccagcaccgaggccacccaccccggctcctaccatcgcctcccagcctctgtccctgcgtccggaggcatgtagacccgcagctggtggggccgtgcatacccggggtcttgacttcgcctgcgatatctacatttgggcccctctggctggtacttgcggggtcctgctgctttcactcgtgatcactctttactgtaagcgcggtcggaagaagctgctgtacatctttaagcaacccttcatgaggcctgtgcagactactcaagaggaggacggctgttcatgccggttcccagaggaggaggaaggcggctgcgaactgcgcgtgaaattcagccgcagcgcagatgctccagcctacaagcaggggcagaaccagctctacaacgaactcaatcttggtcggagagaggagtacgacgtgctggacaagcggagaggacgggacccagaaatgggcgggaagccgcgcagaaagaatccccaagagggcctgtacaacgagctccaaaaggataagatggcagaagcctatagcgagattggtatgaaaggggaacgcagaagaggcaaaggccacgacggactgtaccagggactcagcaccgccaccaaggacacctatgacgctcttcacatgcaggccctgccgcctcgg

SEQ ID NO: 244 - DNA, 1476 bp, Artificial Sequence
  source: /note="Description of Artificial Sequence: Synthetic polynucleotide"
atggccctccctgtcaccgccctgctgcttccgctggctcttctgctccacgccgctcggccccaagtgcagctcgtggaatcgggtggcggactggtgcagccggggggctcacttagactgtcctgcgcggccagcggattcactttctcctcctacgccatgtcctgggtcagacaggcccctggaaagggcctggaatgggtgtccgcaatcagcggcagcggcggctcgacctattacgcggattcagtgaagggcagattcaccatttcccgggacaacgccaagaactccttgtaccttcaaatgaactccctccgcgcggaagataccgcaatctactactgcgctcgggccacttacaagagggaactgcgctactactacgggatggacgtctggggccagggaaccatggtcaccgtgtccagcggaggaggaggatcgggaggaggcggtagcgggggtggagggtcggagatcgtgatgacccagtcccccggcactgtgtcgctgtcccccggcgaacgggccaccctgtcatgtcgggccagccagtcagtgtcgtcaagcttcctcgcctggtaccagcagaaaccgggacaagctccccgcctgctgatctacggagccagcagccgggccaccggtattcctgaccggttctccggttcggggtccgggaccgactttactctgactatctctcgcctcgagccagaggactccgccgtgtattactgccagcagtaccactcctccccgtcctggacgttcggacagggcacaaggctggagattaagaccactaccccagcaccgaggccacccaccccggctcctaccatcgcctcccagcctctgtccctgcgtccggaggcatgtagacccgcagctggtggggccgtgcatacccggggtcttgacttcgcctgcgatatctacatttgggcccctctggctggtacttgcggggtcctgctgctttcactcgtgatcactctttactgtaagcgcggtcggaagaagctgctgtacatctttaagcaacccttcatgaggcctgtgcagactactcaagaggaggacggctgttcatgccggttcccagaggaggaggaaggcggctgcgaactgcgcgtgaaattcagccgcagcgcagatgctccagcctacaagcaggggcagaaccagctctacaacgaactcaatcttggtcggagagaggagtacgacgtgctggacaagcggagaggacgggacccagaaatgggcgggaagccgcgcagaaagaatccccaagagggcctgtacaacgagctccaaaaggataagatggcagaagcctatagcgagattggtatgaaaggggaacgcagaagaggcaaaggccacgacggactgtaccagggactcagcaccgccaccaaggacacctatgacgctcttcacatgcaggccctgccgcctcgg

SEQ ID NO: 245 - DNA, 1476 bp, Artificial Sequence
  source: /note="Description of Artificial Sequence: Synthetic polynucleotide"
atggccctccctgtcaccgccctgctgcttccgctggctcttctgctccacgccgctcggcccgaggtgcagcttgtggaaaccggtggcggactggtgcagcccggaggaagcctcaggctgtcctgcgccgcgtccggcttcaccttctcctcgtacgccatgtcctgggtccgccaggcccccggaaagggcctggaatgggtgtccgccatctctggaagcggaggttccacgtactacgcggacagcgtcaagggaaggttcacaatctcccgcgataattcgaagaacactctgtaccttcaaatgaacaccctgaaggccgaggacactgctgtgtactactgcgcacgggccacctacaagagagagctccggtactactacggaatggacgtctggggccagggaactactgtgaccgtgtcctcgggagggggtggctccggggggggcggctccggcggaggcggttccgagattgtgctgacccagtcaccttcaactctgtcgctgtccccgggagagagcgctactctgagctgccgggccagccagtccgtgtccaccaccttcctcgcctggtatcagcagaagccggggcaggcaccacggctcttgatctacgggtcaagcaacagagcgaccggaattcctgaccgcttctcggggagcggttcaggcaccgacttcaccctgactatccggcgcctggaacccgaagatttcgccgtgtattactgtcaacagtaccactcctcgccgtcctggacctttggccaaggaaccaaagtggaaatcaagaccactaccccagcaccgaggccacccaccccggctcctaccatcgcctcccagcctctgtccctgcgtccggaggcatgtagacccgcagctggtggggccgtgcatacccggggtcttgacttcgcctgcgatatctacatttgggcccctctggctggtacttgcggggtcctgctgctttcactcgtgatcactctttactgtaagcgcggtcggaagaagctgctgtacatctttaagcaacccttcatgaggcctgtgcagactactcaagaggaggacggctgttcatgccggttcccagaggaggaggaaggcggctgcgaactgcgcgtgaaattcagccgcagcgcagatgctccagcctacaagcaggggcagaaccagctctacaacgaactcaatcttggtcggagagaggagtacgacgtgctggacaagcggagaggacgggacccagaaatgggcgggaagccgcgcagaaagaatccccaagagggcctgtacaacgagctccaaaaggataagatggcagaagcctatagcgagattggtatgaaaggggaacgcagaagaggcaaaggccacgacggactgtaccagggactcagcaccgccaccaaggacacctatgacgctcttcacatgcaggccctgccgcctcgg

SEQ ID NO: 246 - DNA, 1449 bp, Artificial Sequence
  source: /note="Description of Artificial Sequence: Synthetic polynucleotide"
atggccctccctgtcaccgccctgctgcttccgctggctcttctgctccacgccgctcggcccgaagtgcagctcgtggaaactggaggtggactcgtgcagcctggacggtcgctgcggctgagctgcgctgcatccggcttcaccttcgacgattatgccatgcactgggtcagacaggcgccagggaagggacttgagtgggtgtccggtatcagctggaatagcggctcaatcggatacgcggactccgtgaagggaaggttcaccatttcccgcgacaacgccaagaactccctgtacttgcaaatgaacagcctccgggatgaggacactgccgtgtactactgcgcccgcgtcggaaaagctgtgcccgacgtctggggccagggaaccactgtgaccgtgtccagcggcgggggtggatcgggcggtggagggtccggtggagggggctcagatattgtgatgacccagaccccctcgtccctgtccgcctcggtcggcgaccgcgtgactatcacatgtagagcctcgcagagcatctccagctacctgaactggtatcagcagaagccggggaaggccccgaagctcctgatctacgcggcatcatcactgcaatcgggagtgccgagccggttttccgggtccggctccggcaccgacttcacgctgaccatttcttccctgcaacccgaggacttcgccacttactactgccagcagtcctactccaccccttactccttcggccaaggaaccaggctggaaatcaagaccactaccccagcaccgaggccacccaccccggctcctaccatcgcctcccagcctctgtccctgcgtccggaggcatgtagacccgcagctggtggggccgtgcatacccggggtcttgacttcgcctgcgatatctacatttgggcccctctggctggtacttgcggggtcctgctgctttcactcgtgatcactctttactgtaagcgcggtcggaagaagctgctgtacatctttaagcaacccttcatgaggcctgtgcagactactcaagaggaggacggctgttcatgccggttcccagaggaggaggaaggcggctgcgaactgcgcgtgaaattcagccgcagcgcagatgctccagcctacaagcaggggcagaaccagctctacaacgaactcaatcttggtcggagagaggagtacgacgtgctggacaagcggagaggacgggacccagaaatgggcgggaagccgcgcagaaagaatccccaagagggcctgtacaacgagctccaaaaggataagatggcagaagcctatagcgagattggtatgaaaggggaacgcagaagaggcaaaggccacgacggactgtaccagggactcagcaccgccaccaaggacacctatgacgctcttcacatgcaggccctgccgcctcgg

SEQ ID NO: 247 - DNA, 1470 bp, Artificial Sequence
  source: /note="Description of Artificial Sequence: Synthetic polynucleotide"
atggccctccctgtcaccgccctgctgcttccgctggctcttctgctccacgccgctcggcccgaagtgcagctcgtggagagcgggggaggattggtgcagcccggaaggtccctgcggctctcctgcactgcgtctggcttcaccttcgacgactacgcgatgcactgggtcagacagcgcccgggaaagggcctggaatgggtcgcctcaatcaactggaagggaaactccctggcctatggcgacagcgtgaagggccgcttcgccatttcgcgcgacaacgccaagaacaccgtgtttctgcaaatgaattccctgcggaccgaggataccgctgtgtactactgcgccagccaccagggcgtggcatactataactacgccatggacgtgtggggaagagggacgctcgtcaccgtgtcctccgggggcggtggatcgggtggaggaggaagcggtggcgggggcagcgaaatcgtgctgactcagagcccgggaactctttcactgtccccgggagaacgggccactctctcgtgccgggccacccagtccatcggctcctccttccttgcctggtaccagcagaggccaggacaggcgccccgcctgctgatctacggtgcttcccaacgcgccactggcattcctgaccggttcagcggcagagggtcgggaaccgatttcacactgaccatttcccgggtggagcccgaagattcggcagtctactactgtcagcattacgagtcctccccttcatggaccttcggtcaagggaccaaagtggagatcaagaccactaccccagcaccgaggccacccaccccggctcctaccatcgcctcccagcctctgtccctgcgtccggaggcatgtagacccgcagctggtggggccgtgcatacccggggtcttgacttcgcctgcgatatctacatttgggcccctctggctggtacttgcggggtcctgctgctttcactcgtgatcactctttactgtaagcgcggtcggaagaagctgctgtacatctttaagcaacccttcatgaggcctgtgcagactactcaagaggaggacggctgttcatgccggttcccagaggaggaggaaggcggctgcgaactgcgcgtgaaattcagccgcagcgcagatgctccagcctacaagcaggggcagaaccagctctacaacgaactcaatcttggtcggagagaggagtacgacgtgctggacaagcggagaggacgggacccagaaatgggcgggaagccgcgcagaaagaatccccaagagggcctgtacaacgagctccaaaaggataagatggcagaagcctatagcgagattggtatgaaaggggaacgcagaagaggcaaaggccacgacggactgtaccagggactcagcaccgccaccaaggacacctatgacgctcttcacatgcaggccctgccgcctcgg

SEQ ID NO: 248 - DNA, 1455 bp, Artificial Sequence
  source: /note="Description of Artificial Sequence: Synthetic polynucleotide"
atggccctccctgtcaccgccctgctgcttccgctggctcttctgctccacgccgctcggcccgaggtgcagttggtcgaaagcgggggcgggcttgtgcagcctggcggatcactgcggctgtcctgcgcggcatcaggcttcacgttttcttcctacgccatgtcctgggtgcgccaggcccctggaaagggactggaatgggtgtccgcgatttcggggtccggcgggagcacctactacgccgattccgtgaagggccgcttcactatctcgcgggacaactccaagaacaccctctacctccaaatgaatagcctgcgggccgaggataccgccgtctactattgcgctaaggtcgtgcgcgacggaatggacgtgtggggacagggtaccaccgtgacagtgtcctcggggggaggcggtagcggcggaggaggaagcggtggtggaggttccgagattgtgctgactcaatcacccgcgaccctgagcctgtcccccggcgaaagggccactctgtcctgtcgggccagccaatcagtctcctcctcgtacctggcctggtaccagcagaagccaggacaggctccgagactccttatctatggcgcatcctcccgcgccaccggaatcccggataggttctcgggaaacggatcggggaccgacttcactctcaccatctcccggctggaaccggaggacttcgccgtgtactactgccagcagtacggcagcccgcctagattcactttcggccccggcaccaaagtggacatcaagaccactaccccagcaccgaggccacccaccccggctcctaccatcgcctcccagcctctgtccctgcgtccggaggcatgtagacccgcagctggtggggccgtgcatacccggggtcttgacttcgcctgcgatatctacatttgggcccctctggctggtacttgcggggtcctgctgctttcactcgtgatcactctttactgtaagcgcggtcggaagaagctgctgtacatctttaagcaacccttcatgaggcctgtgcagactactcaagaggaggacggctgttcatgccggttcccagaggaggaggaaggcggctgcgaactgcgcgtgaaattcagccgcagcgcagatgctccagcctacaagcaggggcagaaccagctctacaacgaactcaatcttggtcggagagaggagtacgacgtgctggacaagcggagaggacgggacccagaaatgggcgggaagccgcgcagaaagaatccccaagagggcctgtacaacgagctccaaaaggataagatggcagaagcctatagcgagattggtatgaaaggggaacgcagaagaggcaaaggccacgacggactgtaccagggactcagcaccgccaccaaggacacctatgacgctcttcacatgcaggccctgccgcctcgg

SEQ ID NO: 249 - DNA, 1458 bp, Artificial Sequence
  source: /note="Description of Artificial Sequence: Synthetic polynucleotide"
atggccctccctgtcaccgccctgctgcttccgctggctcttctgctccacgccgctcggcccgaagtgcagctgctggagtccggcggtggattggtgcaaccggggggatcgctcagactgtcctgtgcggcgtcaggcttcaccttctcgagctacgccatgtcatgggtcagacaggcccctggaaagggtctggaatgggtgtccgccatttccgggagcgggggatctacatactacgccgatagcgtgaagggccgcttcaccatttcccgggacaactccaagaacactctctatctgcaaatgaactccctccgcgctgaggacactgccgtgtactactgcgccaaaatccctcagaccggcaccttcgactactggggacaggggactctggtcaccgtcagcagcggtggcggaggttcggggggaggaggaagcggcggcggagggtccgagattgtgctgacccagtcacccggcactttgtccctgtcgcctggagaaagggccaccctttcctgccgggcatcccaatccgtgtcctcctcgtacctggcctggtaccagcagaggcccggacaggccccacggcttctgatctacggagcaagcagccgcgcgaccggtatcccggaccggttttcgggctcgggctcaggaactgacttcaccctcaccatctcccgcctggaacccgaagatttcgctgtgtattactgccagcactacggcagctccccgtcctggacgttcggccagggaactcggctggagatcaagaccactaccccagcaccgaggccacccaccccggctcctaccatcgcctcccagcctctgtccctgcgtccggaggcatgtagacccgcagctggtggggccgtgcatacccggggtcttgacttcgcctgcgatatctacatttgggcccctctggctggtacttgcggggtcctgctgctttcactcgtgatcactctttactgtaagcgcggtcggaagaagctgctgtacatctttaagcaacccttcatgaggcctgtgcagactactcaagaggaggacggctgttcatgccggttcccagaggaggaggaaggcggctgcgaactgcgcgtgaaattcagccgcagcgcagatgctccagcctacaagcaggggcagaaccagctctacaacgaactcaatcttggtcggagagaggagtacgacgtgctggacaagcggagaggacgggacccagaaatgggcgggaagccgcgcagaaagaatccccaagagggcctgtacaacgagctccaaaaggataagatggcagaagcctatagcgagattggtatgaaaggggaacgcagaagaggcaaaggccacgacggactgtaccagggactcagcaccgccaccaaggacacctatgacgctcttcacatgcaggccctgccgcctcgg

SEQ ID NO: 250 - DNA, 1476 bp, Artificial Sequence
  source: /note="Description of Artificial Sequence: Synthetic polynucleotide"
atggccctccctgtcaccgccctgctgcttccgctggctcttctgctccacgccgctcggcccgaagtgcaactggtggaaaccggtggaggactcgtgcagcctggcggcagcctccggctgagctgcgccgcttcgggattcaccttttcctcctacgcgatgtcttgggtcagacaggcccccggaaaggggctggaatgggtgtcagccatctccggctccggcggatcaacgtactacgccgactccgtgaaaggccggttcaccatgtcgcgcgagaatgacaagaactccgtgttcctgcaaatgaactccctgagggtggaggacaccggagtgtactattgtgcgcgcgccaactacaagagagagctgcggtactactacggaatggacgtctggggacagggaactatggtgaccgtgtcatccggtggagggggaagcggcggtggaggcagcgggggcgggggttcagaaattgtcatgacccagtccccgggaactctttccctctcccccggggaatccgcgactttgtcctgccgggccagccagcgcgtggcctcgaactacctcgcatggtaccagcataagccaggccaagccccttccctgctgatttccggggctagcagccgcgccactggcgtgccggataggttctcgggaagcggctcgggtaccgatttcaccctggcaatctcgcggctggaaccggaggattcggccgtgtactactgccagcactatgactcatccccctcctggacattcggacagggcaccaaggtcgagatcaagaccactaccccagcaccgaggccacccaccccggctcctaccatcgcctcccagcctctgtccctgcgtccggaggcatgtagacccgcagctggtggggccgtgcatacccggggtcttgacttcgcctgcgatatctacatttgggcccctctggctggtacttgcggggtcctgctgctttcactcgtgatcactctttactgtaagcgcggtcggaagaagctgctgtacatctttaagcaacccttcatgaggcctgtgcagactactcaagaggaggacggctgttcatgccggttcccagaggaggaggaaggcggctgcgaactgcgcgtgaaattcagccgcagcgcagatgctccagcctacaagcaggggcagaaccagctctacaacgaactcaatcttggtcggagagaggagtacgacgtgctggacaagcggagaggacgggacccagaaatgggcgggaagccgcgcagaaagaatccccaagagggcctgtacaacgagctccaaaaggataagatggcagaagcctatagcgagattggtatgaaaggggaacgcagaagaggcaaaggccacgacggactgtaccagggactcagcaccgccaccaaggacacctatgacgctcttcacatgcaggccctgccgcctcgg

SEQ ID NO: 251 - DNA, 1464 bp, Artificial Sequence
  source: /note="Description of Artificial Sequence: Synthetic polynucleotide"
atggccctccctgtcaccgccctgctgcttccgctggctcttctgctccacgccgctcggcccgaagtgcagctgctcgaaaccggtggagggctggtgcagccagggggctccctgaggctttcatgcgccgctagcggattctccttctcctcttacgccatgtcgtgggtccgccaagcccctggaaaaggcctggaatgggtgtccgcgatttccgggagcggaggttcgacctattacgccgactccgtgaagggccgctttaccatctcccgggataactccaagaacactctgtacctccaaatgaactcgctgagagccgaggacaccgccgtgtattactgcgcgaaggcgctggtcggcgcgactggggcattcgacatctggggacagggaactcttgtgaccgtgtcgagcggaggcggcggctccggcggaggagggagcgggggcggtggttccgaaatcgtgttgactcagtccccgggaaccctgagcttgtcacccggggagcgggccactctctcctgtcgcgcctcccaatcgctctcatccaatttcctggcctggtaccagcagaagcccggacaggccccgggcctgctcatctacggcgcttcaaactgggcaacgggaacccctgatcggttcagcggaagcggatcgggtactgactttaccctgaccatcaccagactggaaccggaggacttcgccgtgtactactgccagtactacggcacctcccccatgtacacattcggacagggtaccaaggtcgagattaagaccactaccccagcaccgaggccacccaccccggctcctaccatcgcctcccagcctctgtccctgcgtccggaggcatgtagacccgcagctggtggggccgtgcatacccggggtcttgacttcgcctgcgatatctacatttgggcccctctggctggtacttgcggggtcctgctgctttcactcgtgatcactctttactgtaagcgcggtcggaagaagctgctgtacatctttaagcaacccttcatgaggcctgtgcagactactcaagaggaggacggctgttcatgccggttcccagaggaggaggaaggcggctgcgaactgcgcgtgaaattcagccgcagcgcagatgctccagcctacaagcaggggcagaaccagctctacaacgaactcaatcttggtcggagagaggagtacgacgtgctggacaagcggagaggacgggacccagaaatgggcgggaagccgcgcagaaagaatccccaagagggcctgtacaacgagctccaaaaggataagatggcagaagcctatagcgagattggtatgaaaggggaacgcagaagaggcaaaggccacgacggactgtaccagggactcagcaccgccaccaaggacacctatgacgctcttcacatgcaggccctgccgcctcgg

SEQ ID NO: 252 - DNA, 1464 bp, Artificial Sequence
  source: /note="Description of Artificial Sequence: Synthetic polynucleotide"
atggccctccctgtcaccgccctgctgcttccgctggctcttctgctccacgccgctcggcccgaagtgcagctgcttgagagcggtggaggtctggtgcagcccgggggatcactgcgcctgtcctgtgccgcgtccggtttcactttctcctcgtacgccatgtcgtgggtcagacaggcaccgggaaagggactggaatgggtgtcagccatttcgggttcggggggcagcacctactacgctgactccgtgaagggccggttcaccatttcccgcgacaactccaagaacaccttgtacctccaaatgaactccctgcgggccgaagataccgccgtgtattactgcgtgctgtggttcggagagggattcgacccgtggggacaaggaacactcgtgactgtgtcatccggcggaggcggcagcggtggcggcggttccggcggcggcggatctgacatcgtgttgacccagtcccctctgagcctgccggtcactcctggcgaaccagccagcatctcctgccggtcgagccagtccctcctgcactccaatgggtacaactacctcgattggtatctgcaaaagccgggccagagcccccagctgctgatctaccttgggtcaaaccgcgcttccggggtgcctgatagattctccgggtccgggagcggaaccgactttaccctgaaaatctcgagggtggaggccgaggacgtcggagtgtactactgcatgcaggcgctccagactcccctgaccttcggaggaggaacgaaggtcgacatcaagaccactaccccagcaccgaggccacccaccccggctcctaccatcgcctcccagcctctgtccctgcgtccggaggcatgtagacccgcagctggtggggccgtgcatacccggggtcttgacttcgcctgcgatatctacatttgggcccctctggctggtacttgcggggtcctgctgctttcactcgtgatcactctttactgtaagcgcggtcggaagaagctgctgtacatctttaagcaacccttcatgaggcctgtgcagactactcaagaggaggacggctgttcatgccggttcccagaggaggaggaaggcggctgcgaactgcgcgtgaaattcagccgcagcgcagatgctccagcctacaagcaggggcagaaccagctctacaacgaactcaatcttggtcggagagaggagtacgacgtgctggacaagcggagaggacgggacccagaaatgggcgggaagccgcgcagaaagaatccccaagagggcctgtacaacgagctccaaaaggataagatggcagaagcctatagcgagattggtatgaaaggggaacgcagaagaggcaaaggccacgacggactgtaccagggactcagcaccgccaccaaggacacctatgacgctcttcacatgcaggccctgccgcctcgg

SEQ ID NO: 253 - DNA, 1485 bp, Artificial Sequence
  source: /note="Description of Artificial Sequence: Synthetic polynucleotide"
atggccctccctgtcaccgccctgctgcttccgctggctcttctgctccacgccgctcggccccaagtgcagctcgtggagtcaggcggaggactggtgcagcccgggggctccctgagactttcctgcgcggcatcgggttttaccttctcctcctatgctatgtcctgggtgcgccaggccccgggaaagggactggaatgggtgtccgcaatcagcggtagcgggggctcaacatactacgccgactccgtcaagggtcgcttcactatttcccgggacaactccaagaataccctgtacctccaaatgaacagcctcagggccgaggatactgccgtgtactactgcgccaaagtcggatacgatagctccggttactaccgggactactacggaatggacgtgtggggacagggcaccaccgtgaccgtgtcaagcggcggaggcggttcaggagggggaggctccggcggtggagggtccgaaatcgtcctgactcagtcgcctggcactctgtcgttgtccccgggggagcgcgctaccctgtcgtgtcgggcgtcgcagtccgtgtcgagctcctacctcgcgtggtaccagcagaagcccggacaggcccctagacttctgatctacggcacttcttcacgcgccaccgggatcagcgacaggttcagcggctccggctccgggaccgacttcaccctgaccattagccggctggagcctgaagatttcgccgtgtattactgccaacactacggaaactcgccgccaaagttcacgttcggacccggaaccaagctggaaatcaagaccactaccccagcaccgaggccacccaccccggctcctaccatcgcctcccagcctctgtccctgcgtccggaggcatgtagacccgcagctggtggggccgtgcatacccggggtcttgacttcgcctgcgatatctacatttgggcccctctggctggtacttgcggggtcctgctgctttcactcgtgatcactctttactgtaagcgcggtcggaagaagctgctgtacatctttaagcaacccttcatgaggcctgtgcagactactcaagaggaggacggctgttcatgccggttcccagaggaggaggaaggcggctgcgaactgcgcgtgaaattcagccgcagcgcagatgctccagcctacaagcaggggcagaaccagctctacaacgaactcaatcttggtcggagagaggagtacgacgtgctggacaagcggagaggacgggacccagaaatgggcgggaagccgcgcagaaagaatccccaagagggcctgtacaacgagctccaaaaggataagatggcagaagcctatagcgagattggtatgaaaggggaacgcagaagaggcaaaggccacgacggactgtaccagggactcagcaccgccaccaaggacacctatgacgctcttcacatgcaggccctgccgcctcgg

SEQ ID NO: 254 - DNA, 1470 bp, Artificial Sequence
  source: /note="Description of Artificial Sequence: Synthetic polynucleotide"
atggccctccctgtcaccgccctgctgcttccgctggctcttctgctccacgccgctcggcccgaagtccaactggtggagtccgggggagggctcgtgcagcccggaggcagccttcggctgtcgtgcgccgcctccgggttcacgttctcatcctacgcgatgtcgtgggtcagacaggcaccaggaaagggactggaatgggtgtccgccattagcggctccggcggtagcacctactatgccgactcagtgaagggaaggttcactatctcccgcgacaacagcaagaacaccctgtacctccaaatgaactctctgcgggccgaggataccgcggtgtactattgcgccaagatgggttggtccagcggatacttgggagccttcgacatttggggacagggcactactgtgaccgtgtcctccgggggtggcggatcgggaggcggcggctcgggtggagggggttccgaaatcgtgttgacccagtcaccgggaaccctctcgctgtccccgggagaacgggctacactgtcatgtagagcgtcccagtccgtggcttcctcgttcctggcctggtaccagcagaagccgggacaggcaccccgcctgctcatctacggagccagcggccgggcgaccggcatccctgaccgcttctccggttccggctcgggcaccgactttactctgaccattagcaggcttgagcccgaggattttgccgtgtactactgccaacactacggggggagccctcgcctgaccttcggaggcggaactaaggtcgatatcaaaaccactaccccagcaccgaggccacccaccccggctcctaccatcgcctcccagcctctgtccctgcgtccggaggcatgtagacccgcagctggtggggccgtgcatacccggggtcttgacttcgcctgcgatatctacatttgggcccctctggctggtacttgcggggtcctgctgctttcactcgtgatcactctttactgtaagcgcggtcggaagaagctgctgtacatctttaagcaacccttcatgaggcctgtgcagactactcaagaggaggacggctgttcatgccggttcccagaggaggaggaaggcggctgcgaactgcgcgtgaaattcagccgcagcgcagatgctccagcctacaagcaggggcagaaccagctctacaacgaactcaatcttggtcggagagaggagtacgacgtgctggacaagcggagaggacgggacccagaaatgggcgggaagccgcgcagaaagaatccccaagagggcctgtacaacgagctccaaaaggataagatggcagaagcctatagcgagattggtatgaaaggggaacgcagaagaggcaaaggccacgacggactgtaccagggactcagcaccgccaccaaggacacctatgacgctcttcacatgcaggccctgccgcctcgg

SEQ ID NO: 255-270 - skipped (16 entries)

SEQ ID NO: 271 - protein, 448 aa, Artificial Sequence
  source: /note="Description of Artificial Sequence: Synthetic polypeptide"
QVQLQESGPGLVKPSQTLSLTCTVSDYSITSDYAWNWIRQFPGKGLEWMGYISYSGSTSYNPSLKSRITISRDTSKNQFSLQLNSVTAADTAVYYCASFDYAHAMDYWGQGTTVTVSSASTKGPSVFPLAPSSKSTSGGTAALGCLVKDYFPEPVTVSWNSGALTSGVHTFPAVLQSSGLYSLSSVVTVPSSSLGTQTYICNVNHKPSNTKVDKRVEPKSCDKTHTCPPCPAPELLGGPSVFLFPPKPKDTLMISRTPEVTCVVVDVSHEDPEVKFNWYVDGVEVHNAKTKPREEQYNSTYRVVSVLTVLHQDWLNGKEYKCKVSNKALPAPIEKTISKAKGQPREPQVYTLPPSREEMTKNQVSLTCLVKGFYPSDIAVEWESNGQPENNYKTTPPVLDSDGSFFLYSKLTVDKSRWQQGNVFSCSVMHEALHNHYTQKSLSLSPGK

SEQ ID NO: 272 - protein, 214 aa, Artificial Sequence
  source: /note="Description of Artificial Sequence: Synthetic polypeptide"
DIVLTQSPAFLSVTPGEKVTFTCQASQSIGTSIHWYQQKTDQAPKLLIKYASESISGIPSRFSGSGSGTDFTLTISSVEAEDAADYYCQQINSWPTTFGGGTKLEIKRTVAAPSVFIFPPSDEQLKSGTASVVCLLNNFYPREAKVQWKVDNALQSGNSQESVTEQDSKDSTYSLSSTLTLSKADYEKHKVYACEVTHQGLSSPVTKSFNRGEC

SEQ ID NO: 273 - protein, 6 aa, Artificial Sequence
  source: /note="Description of Artificial Sequence: Synthetic peptide"
SDYAWN

SEQ ID NO: 274 - protein, 16 aa, Artificial Sequence
  source: /note="Description of Artificial Sequence: Synthetic peptide"
YISYSGSTSYNPSLKS

SEQ ID NO: 275 - protein, 9 aa, Artificial Sequence
  source: /note="Description of Artificial Sequence: Synthetic peptide"
FDYAHAMDY

SEQ ID NO: 276 - protein, 11 aa, Artificial Sequence
  source: /note="Description of Artificial Sequence: Synthetic peptide"
QASQSIGTSIH

SEQ ID NO: 277 - protein, 7 aa, Artificial Sequence
  source: /note="Description of Artificial Sequence: Synthetic peptide"
YASESIS

SEQ ID NO: 278 - protein, 9 aa, Artificial Sequence
  source: /note="Description of Artificial Sequence: Synthetic peptide"
QQINSWPTT

SEQ ID NO: 279 - protein, 143 aa, Artificial Sequence
  source: /note="Description of Artificial Sequence: Synthetic polypeptide"
GAPAGPLIVPYNLPLPGGVVPRMLITILGTVKPNANRIALDFQRGNDVAFHFNPRFNENNRRVIVCNTKLDNNWGREERQSVFPFESGKPFKIQVLVEPDHFKVAVNDAHLLQYNHRVKKLNEISKLGISGDIDITSASYTMI

SEQ ID NO: 280 - protein, 447 aa, Artificial Sequence
  source: /note="Description of Artificial Sequence: Synthetic polypeptide"
QVQLVQSGAEVKKPGSSVKVSCKASGYTFSSNVISWVRQAPGQGLEWMGGVIPIVDIANYAQRFKGRVTITADESTSTTYMELSSLRSEDTAVYYCASTLGLVLDAMDYWGQGTLVTVSSASTKGPSVFPLAPCSRSTSESTAALGCLVKDYFPEPVTVSWNSGALTSGVHTFPAVLQSSGLYSLSSVVTVPSSSLGTKTYTCNVDHKPSNTKVDKRVESKYGPPCPSCPAPEFLGGPSVFLFPPKPKDTLMISRTPEVTCVVVDVSQEDPEVQFNWYVDGVEVHNAKTKPREEQFNSTYRVVSVLTVLHQDWLNGKEYKCKVSNKGLPSSIEKTISKAKGQPREPQVYTLPPSQEEMTKNQVSLTCLVKGFYPSDIAVEWESNGQPENNYKTTPPVLDSDGSFFLYSRLTVDKSRWQEGNVFSCSVMHEALHNHYTQKSLSLSLGK

SEQ ID NO: 281 - protein, 215 aa, Artificial Sequence
  source: /note="Description of Artificial Sequence: Synthetic polypeptide"
ETVLTQSPGTLSLSPGERATLSCRASQSLGSSYLAWYQQKPGQAPRLLIYGASSRAPGIPDRFSGSGSGTDFTLTISRLEPEDFAVYYCQQYADSPITFGQGTRLEIKRTVAAPSVFIFPPSDEQLKSGTASVVCLLNNFYPREAKVQWKVDNALQSGNSQESVTEQDSKDSTYSLSSTLTLSKADYEKHKVYACEVTHQGLSSPVTKSFNRGEC

SEQ ID NO: 282 - protein, 137 aa, Artificial Sequence
  source: /note="Description of Artificial Sequence: Synthetic polypeptide"
MEFGLSWVFLVALLRGVQCQVQLVESGGGVVQPGRSLRLSCAASGFTFSVYGMNWVRQAPGKGLEWVAIIWYDGDNQYYADSVKGRFTISRDNSKNTLYLQMNGLRAEDTAVYYCARDLRTGPFDYWGQGTLVTVSS

SEQ ID NO: 283 - protein, 126 aa, Artificial Sequence
  source: /note="Description of Artificial Sequence: Synthetic polypeptide"
MLPSQLIGFLLLWVPASRGEIVLTQSPDFQSVTPKEKVTITCRASQSIGSSLHWYQQKPDQSPKLLIKYASQSFSGVPSRFSGSGSGTDFTLTINSLEAEDAAAYYCHQSSSLPFTFGPGTKVDIK

SEQ ID NO: 284 - protein, 121 aa, Artificial Sequence
  source: /note="Description of Artificial Sequence: Synthetic polypeptide"
QVQLVQSGAEVKKPGSSVKVSCKASGGTFSSYAISWVRQAPGQGLEWMGGIIPIFGTANYAQKFQGRVTITADESTSTAYMELSSLRSEDTAVYYCARGLWEVRALPSVYWGQGTLVTVSS

SEQ ID NO: 285 - protein, 109 aa, Artificial Sequence
  source: /note="Description of Artificial Sequence: Synthetic polypeptide"
SYELTQPPSVSVAPGQTARITCGANDIGSKSVHWYQQKAGQAPVLVVSEDIIRPSGIPERISGSNSGNTATLTISRVEAGDEADYYCQVWDRDSDQYVFGTGTKVTVLG

SEQ ID NO: 286 - protein, 9 aa, Artificial Sequence
  source: /note="Description of Artificial Sequence: Synthetic peptide"
QNDYSYPYT

SEQ ID NO: 287-391 - skipped (105 entries)

SEQ ID NO: 392 - protein, 462 aa, Artificial Sequence
  source: /note="Description of Artificial Sequence: Synthetic polypeptide"
EVQLVESGGGLVQPGGSLRLSCAVSGFALSNHGMSWVRRAPGKGLEWVSGIVYSGSTYYAASVKGRFTISRDNSRNTLYLQMNSLRPEDTAIYYCSAHGGESDVWGQGTTVTVSSASGGGGSGGRASGGGGSDIQLTQSPSSLSASVGDRVTITCRASQSISSYLNWYQQKPGKAPKLLIYAASSLQSGVPSRFSGSGSGTDFTLTISSLQPEDFATYYCQQSYSTPYTFGQGTKVEIKTTTPAPRPPTPAPTIASQPLSLRPEACRPAAGGAVHTRGLDFACDIYIWAPLAGTCGVLLLSLVITLYCKRGRKKLLYIFKQPFMRPVQTTQEEDGCSCRFPEEEEGGCELRVKFSRSADAPAYKQGQNQLYNELNLGRREEYDVLDKRRGRDPEMGGKPRRKNPQEGLYNELQKDKMAEAYSEIGMKGERRRGKGHDGLYQGLSTATKDTYDALHMQALPPR

SEQ ID NO: 393 - protein, 445 aa, Artificial Sequence
  source: /note="Description of Artificial Sequence: Synthetic polypeptide"
EVQLVESGGGLVQPGGSLRLSCAVSGFALSNHGMSWVRRAPGKGLEWVSGIVYSGSTYYAASVKGRFTISRDNSRNTLYLQMNSLRPEDTAIYYCSAHGGESDVWGQGTTVTVSSDIQLTQSPSSLSASVGDRVTITCRASQSISSYLNWYQQKPGKAPKLLIYAASSLQSGVPSRFSGSGSGTDFTLTISSLQPEDFATYYCQQSYSTPYTFGQGTKVEIKTTTPAPRPPTPAPTIASQPLSLRPEACRPAAGGAVHTRGLDFACDIYIWAPLAGTCGVLLLSLVITLYCKRGRKKLLYIFKQPFMRPVQTTQEEDGCSCRFPEEEEGGCELRVKFSRSADAPAYKQGQNQLYNELNLGRREEYDVLDKRRGRDPEMGGKPRRKNPQEGLYNELQKDKMAEAYSEIGMKGERRRGKGHDGLYQGLSTATKDTYDALHMQALPPR

SEQ ID NO: 394-1008 - skipped (615 entries)

SEQ ID NO: 1009 - protein, 4 aa, Artificial Sequence
  source: /note="Description of Artificial Sequence: Synthetic polypeptide"
  source: /note="See specification as filed for detailed description of substitutions and preferred embodiments"
GGGS

SEQ ID NO: 1010 - protein, 20 aa, Artificial Sequence
  source: /note="Description of Artificial Sequence: Synthetic peptide"
GGGGSGGGGSGGGGSGGGGS

SEQ ID NO: 1011 - protein, 15 aa, Artificial Sequence
  source: /note="Description of Artificial Sequence: Synthetic peptide"
GGGGSGGGGSGGGGS

SEQ ID NO: 1012 - protein, 4 aa, Artificial Sequence
  source: /note="Description of Artificial Sequence: Synthetic peptide"
GGGS

SEQ ID NO: 1013 - RNA, 5000 nt, Artificial Sequence
  source: /note="Description of Artificial Sequence: Synthetic polynucleotide"
  misc_feature (1)..(5000): /note="This sequence may encompass 50-5000 repeating units"
aaaaaaaaaaaaaaaaaaaaaaaaaaaaaaaaaaaaaaaaaaaaaaaaaaaaaaaaaaaaaaaaaaaaaaaaaaaaaaaaaaaaaaaaaaaaaaaaaaaaaaaaaaaaaaaaaaaaaaaaaaaaaaaaaaaaaaaaaaaaaaaaaaaaaaaaaaaaaaaaaaaaaaaaaaaaaaaaaaaaaaaaaaaaaaaaaaaaaaaaaaaaaaaaaaaaaaaaaaaaaaaaaaaaaaaaaaaaaaaaaaaaaaaaaaaaaaaaaaaaaaaaaaaaaaaaaaaaaaaaaaaaaaaaaaaaaaaaaaaaaaaaaaaaaaaaaaaaaaaaaaaaaaaaaaaaaaaaaaaaaaaaaaaaaaaaaaaaaaaaaaaaaaaaaaaaaaaaaaaaaaaaaaaaaaaaaaaaaaaaaaaaaaaaaaaaaaaaaaaaaaaaaaaaaaaaaaaaaaaaaaaaaaaaaaaaaaaaaaaaaaaaaaaaaaaaaaaaaaaaaaaaaaaaaaaaaaaaaaaaaaaaaaaaaaaaaaaaaaaaaaaaaaaaaaaaaaaaaaaaaaaaaaaaaaaaaaaaaaaaaaaaaaaaaaaaaaaaaaaaaaaaaaaaaaaaaaaaaaaaaaaaaaaaaaaaaaaaaaaaaaaaaaaaaaaaaaaaaaaaaaaaaaaaaaaaaaaaaaaaaaaaaaaaaaaaaaaaaaaaaaaaaaaaaaaaaaaaaaaaaaaaaaaaaaaaaaaaaaaaaaaaaaaaaaaaaaaaaaaaaaaaaaaaaaaaaaaaaaaaaaaaaaaaaaaaaaaaaaaaaaaaaaaaaaaaaaaaaaaaaaaaaaaaaaaaaaaaaaaaaaaaaaaaaaaaaaaaaaaaaaaaaaaaaaaaaaaaaaaaaaaaaaaaaaaaaaaaaaaaaaaaaaaaaaaaaaaaaaaaaaaaaaaaaaaaaaaaaaaaaaaaaaaaaaaaaaaaaaaaaaaaaaaaaaaaaaaaaaaaaaaaaaaaaaaaaaaaaaaaaaaaaaaaaaaaaaaaaaaaaaaaaaaaaaaaaaaaaaaaaaaaaaaaaaaaaaaaaaaaaaaaaaaaaaaaaaaaaaaaaaaaaaaaaaaaaaaaaaaaaaaaaaaaaaaaaaaaaaaaaaaaaaaaaaaaaaaaaaaaaaaaaaaaaaaaaaaaaaaaaaaaaaaaaaaaaaaaaaaaaaaaaaaaaaaaaaaaaaaaaaaaaaaaaaaaaaaaaaaaaaaaaaaaaaaaaaaaaaaaaaaaaaaaaaaaaaaaaaaaaaaaaaaaaaaaaaaaaaaaaaaaaaaaaaaaaaaaaaaaaaaaaaaaaaaaaaaaaaaaaaaaaaaaaaaaaaaaaaaaaaaaaaaaaaaaaaaaaaaaaaaaaaaaaaaaaaaaaaaaaaaaaaaaaaaaaaaaaaaaaaaaaaaaaaaaaaaaaaaaaaaaaaaaaaaaaaaaaaaaaaaaaaaaaaaaaaaaaaaaaaaaaaaaaaaaaaaaaaaaaaaaaaaaaaaaaaaaaaaaaaaaaaaaaaaaaaaaaaaaaaaaaaaaaaaaaaaaaaaaaaaaaaaaaaaaaaaaaaaaaaaaaaaaaaaaaaaaaaaaaaaaaaaaaaaaaaaaaaaaaaaaaaaaaaaaaaaaaaaaaaaaaaaaaaaaaaaaaaaaaaaaaaaaaaaaaaaaaaaaaaaaaaaaaaaaaaaaaaaaaaaaaaaaaaaaaaaaaaaaaaaaaaaaaaaaaaaaaaaaaaaaaaaaaaaaaaaaaaaaaaaaaaaaaaaaaaaaaaaaaaaaaaaaaaaaaaaaaaaaaaaaaaaaaaaaaaaaaaaaaaaaaaaaaaaaaaaaaaaaaaaaaaaaaaaaaaaaaaaaaaaaaaaaaaaaaaaaaaaaaaaaaaaaaaaaaaaaaaaaaaaaaaaaaaaaaaaaaaaaaaaaaaaaaaaaaaaaaaaaaaaaaaaaaaaaaaaaaaaaaaaaaaaaaaaaaaaaaaaaaaaaaaaaaaaaaaaaaaaaaaaaaaaaaaaaaaaaaaaaaaaaaaaaaaaaaaaaaaaaaaaaaaaaaaaaaaaaaaaaaaaaaaaaaaaaaaaaaaaaaaaaaaaaaaaaaaaaaaaaaaaaaaaaaaaaaaaaaaaaaaaaaaaaaaaaaaaaaaaaaaaaaaaaaaaaaaaaaaaaaaaaaaaaaaaaaaaaaaaaaaaaaaaaaaaaaaaaaaaaaaaaaaaaaaaaaaaaaaaaaaaaaaaaaaaaaaaaaaaaaaaaaaaaaaaaaaaaaaaaaaaaaaaaaaaaaaaaaaaaaaaaaaaaaaaaaaaaaaaaaaaaaaaaaaaaaaaaaaaaaaaaaaaaaaaaaaaaaaaaaaaaaaaaaaaaaaaaaaaaaaaaaaaaaaaaaaaaaaaaaaaaaaaaaaaaaaaaaaaaaaaaaaaaaaaaaaaaaaaaaaaaaaaaaaaaaaaaaaaaaaaaaaaaaaaaaaaaaaaaaaaaaaaaaaaaaaaaaaaaaaaaaaaaaaaaaaaaaaaaaaaaaaaaaaaaaaaaaaaaaaaaaaaaaaaaaaaaaaaaaaaaaaaaaaaaaaaaaaaaaaaaaaaaaaaaaaaaaaaaaaaaaaaaaaaaaaaaaaaaaaaaaaaaaaaaaaaaaaaaaaaaaaaaaaaaaaaaaaaaaaaaaaaaaaaaaaaaaaaaaaaaaaaaaaaaaaaaaaaaaaaaaaaaaaaaaaaaaaaaaaaaaaaaaaaaaaaaaaaaaaaaaaaaaaaaaaaaaaaaaaaaaaaaaaaaaaaaaaaaaaaaaaaaaaaaaaaaaaaaaaaaaaaaaaaaaaaaaaaaaaaaaaaaaaaaaaaaaaaaaaaaaaaaaaaaaaaaaaaaaaaaaaaaaaaaaaaaaaaaaaaaaaaaaaaaaaaaaaaaaaaaaaaaaaaaaaaaaaaaaaaaaaaaaaaaaaaaaaaaaaaaaaaaaaaaaaaaaaaaaaaaaaaaaaaaaaaaaaaaaaaaaaaaaaaaaaaaaaaaaaaaaaaaaaaaaaaaaaaaaaaaaaaaaaaaaaaaaaaaaaaaaaaaaaaaaaaaaaaaaaaaaaaaaaaaaaaaaaaaaaaaaaaaaaaaaaaaaaaaaaaaaaaaaaaaaaaaaaaaaaaaaaaaaaaaaaaaaaaaaaaaaaaaaaaaaaaaaaaaaaaaaaaaaaaaaaaaaaaaaaaaaaaaaaaaaaaaaaaaaaaaaaaaaaaaaaaaaaaaaaaaaaaaaaaaaaaaaaaaaaaaaaaaaaaaaaaaaaaaaaaaaaaaaaaaaaaaaaaaaaaaaaaaaaaaaaaaaaaaaaaaaaaaaaaaaaaaaaaaaaaaaaaaaaaaaaaaaaaaaaaaaaaaaaaaaaaaaaaaaaaaaaaaaaaaaaaaaaaaaaaaaaaaaaaaaaaaaaaaaaaaaaaaaaaaaaaaaaaaaaaaaaaaaaaaaaaaaaaaaaaaaaaaaaaaaaaaaaaaaaaaaaaaaaaaaaaaaaaaaaaaaaaaaaaaaaaaaaaaaaaaaaaaaaaaaaaaaaaaaaaaaaaaaaaaaaaaaaaaaaaaaaaaaaaaaaaaaaaaaaaaaaaaaaaaaaaaaaaaaaaaaaaaaaaaaaaaaaaaaaaaaaaaaaaaaaaaaaaaaaaaaaaaaaaaaaaaaaaaaaaaaaaaaaaaaaaaaaaaaaaaaaaaaaaaaaaaaaaaaaaaaaaaaaaaaaaaaaaaaaaaaaaaaaaaaaaaaaaaaaaaaaaaaaaaaaaaaaaaaaaaaaaaaaaaaaaaaaaaaaaaaaaaaaaaaaaaaaaaaaaaaaaaaaaaaaaaaaaaaaaaaaaaaaaaaaaaaaaaaaaaaaaaaaaaaaaaaaaaaaaaaaaaaaaaaaaaaaaaaaaaaaaaaaaaaaaaaaaaaaaaaaaaaaaaaaaaaaaaaaaaaaaaaaaaaaaaaaaaaaaaaaaaaaaaaaaaaaaaaaaaaaaaaaaaaaaaaaaaaaaaaaaaaaaaaaaaaaaaaaaaaaaaaaaaaaaaaaaaaaaaaaaaaaaaaaaaaaaaaaaaaaaaaaaaaaaaaaaaaaaaaaaaaaaaaaaaaaaaaaaaaaaaaaaaaaaaaaaaaaaaaaaaaaaaaaaaaaaaaaaaaaaaaaaaaaaaaaaaaaaaaaaaaaaaaaaaaaaaaaaaaaaaaaaaaaaaaaaaaaaaaaaaaaaaaaaaaaaaaaaaaaaaaaaaaaaaaaaaaaaaaaaaaaaaaaaaaaaaaaaaaaaaaaaaaaaaaaaaaaaaaaaaaaaaaaaaaaaaaaaaaaaaaaaaaaaaaaaaaaaaaaaaaaaaaaaaaaaaaaaaaaaaaaaaaaaaaaaaaaaaaaaaaaaaaaaaaaaaaaaaaaaaaaaaaaaaaaaaaaaaaaaaaaaaaaaaaaaaaaaaaaaaaaaaaaaaaaaaaaaaaaaaaaaaaaaaaaaaaaaaaaaaaaaaaaaaaaaaaaaaaaaaaaaaaaaaaaaaaaaaaaaaaaaaaaaaaaaaaaaaaaaaaaaaaaaaaaaaaaaaaaaaaaaaaaaaaaaaaaaaaaaaaaaaaaaaaaaaaaaaaaaaaaaaaaaaaaaaaaaaaaaaaaaaaaaaaaaaaaaaaaaaaaaaaaaaaaaaaaaaaaaaaaaaaaaaaaaaaaaaaaaaaaaaaaaaaaaaaaaaaaaaaaaaaaaaaaaaaaaaaaaaaaaaaaaaaaaaaaaaaaaaaaaaaaaaaaaaaaaaaaaaaaaaaaaaaaaaaaaaaaaaaaaaaaaaaaaaaaaaaaaaaaaaaaaaaaaaaaaaaaaaaaaaaaaaaaaaaaaaaaaaaaaaaaaaaaaaaaaaaaaaaaaaaaaaaaaaaaaaaaaaaaaaaaaaaaaaaaaaaaaaaaaaaaaaaaaaaaaaaaaaaaaaaaaaaaaaaaaaaaaaaaaaaaaaaaaaaaaaaaaaaaaaaaaaaaaaaaaaaaaaaaaaaaaaaaaaaaaaaaaaaaaaaaaaaaaaaaaaaaaaaaaaaaaaaaaaaaaaaaaaaaaaaaaaaaaaaaaaaaaaaaaaaaaaaaaaaaaaaaaaaaaaaaaaaaaaaaaaaaaaaaaaaaaaaaaa

SEQ ID NO: 1014 - DNA, 1184 bp, Artificial Sequence
  source: /note="Description of Artificial Sequence: Synthetic polynucleotide"
cgtgaggctccggtgcccgtcagtgggcagagcgcacatcgcccacagtccccgagaagttggggggaggggtcggcaattgaaccggtgcctagagaaggtggcgcggggtaaactgggaaagtgatgtcgtgtactggctccgcctttttcccgagggtgggggagaaccgtatataagtgcagtagtcgccgtgaacgttctttttcgcaacgggtttgccgccagaacacaggtaagtgccgtgtgtggttcccgcgggcctggcctctttacgggttatggcccttgcgtgccttgaattacttccacctggctgcagtacgtgattcttgatcccgagcttcgggttggaagtgggtgggagagttcgaggccttgcgcttaaggagccccttcgcctcgtgcttgagttgaggcctggcctgggcgctggggccgccgcgtgcgaatctggtggcaccttcgcgcctgtctcgctgctttcgataagtctctagccatttaaaatttttgatgacctgctgcgacgctttttttctggcaagatagtcttgtaaatgcgggccaagatctgcacactggtatttcggtttttggggccgcgggcggcgacggggcccgtgcgtcccagcgcacatgttcggcgaggcggggcctgcgagcgcggccaccgagaatcggacgggggtagtctcaagctggccggcctgctctggtgcctggcctcgcgccgccgtgtatcgccccgccctgggcggcaaggctggcccggtcggcaccagttgcgtgagcggaaagatggccgcttcccggccctgctgcagggagctcaaaatggaggacgcggcgctcgggagagcgggcgggtgagtcacccacacaaaggaaaagggcctttccgtcctcagccgtcgcttcatgtgactccacggagtaccgggcgccgtccaggcacctcgattagttctcgagcttttggagtacgtcgtctttaggttggggggaggggttttatgcgatggagtttccccacactgagtgggtggagactgaagttaggccagcttggcacttgatgtaattctccttggaatttgccctttttgagtttggatcttggttcattctcaagcctcagacagtggttcaaagtttttttcttccatttcaggtgtcgtga

SEQ ID NO: 1015 - protein, 21 aa, Artificial Sequence
  source: /note="Description of Artificial Sequence: Synthetic peptide"
MALPVTALLLPLALLLHAARP

SEQ ID NO: 1016 - DNA, 63 bp, Artificial Sequence
  source: /note="Description of Artificial Sequence: Synthetic oligonucleotide"
atggccctgcctgtgacagccctgctgctgcctctggctctgctgctgcatgccgctagaccc

SEQ ID NO: 1017 - DNA, 63 bp, Artificial Sequence
  source: /note="Description of Artificial Sequence: Synthetic oligonucleotide"
atggccctccctgtcaccgccctgctgcttccgctggctcttctgctccacgccgctcggccc

SEQ ID NO: 1018 - protein, 45 aa, Artificial Sequence
  source: /note="Description of Artificial Sequence: Synthetic polypeptide"
TTTPAPRPPTPAPTIASQPLSLRPEACRPAAGGAVHTRGLDFACD

SEQ ID NO: 1019 - DNA, 135 bp, Artificial Sequence
  source: /note="Description of Artificial Sequence: Synthetic polynucleotide"
accacgacgccagcgccgcgaccaccaacaccggcgcccaccatcgcgtcgcagcccctgtccctgcgcccagaggcgtgccggccagcggcggggggcgcagtgcacacgagggggctggacttcgcctgtgat

SEQ ID NO: 1020 - protein, 230 aa, Artificial Sequence
  source: /note="Description of Artificial Sequence: Synthetic polypeptide"
ESKYGPPCPPCPAPEFLGGPSVFLFPPKPKDTLMISRTPEVTCVVVDVSQEDPEVQFNWYVDGVEVHNAKTKPREEQFNSTYRVVSVLTVLHQDWLNGKEYKCKVSNKGLPSSIEKTISKAKGQPREPQVYTLPPSQEEMTKNQVSLTCLVKGFYPSDIAVEWESNGQPENNYKTTPPVLDSDGSFFLYSRLTVDKSRWQEGNVFSCSVMHEALHNHYTQKSLSLSLGKM

SEQ ID NO: 1021 - DNA, 690 bp, Artificial Sequence
  source: /note="Description of Artificial Sequence: Synthetic polynucleotide"
gagagcaagtacggccctccctgccccccttgccctgcccccgagttcctgggcggacccagcgtgttcctgttcccccccaagcccaaggacaccctgatgatcagccggacccccgaggtgacctgtgtggtggtggacgtgtcccaggaggaccccgaggtccagttcaactggtacgtggacggcgtggaggtgcacaacgccaagaccaagccccgggaggagcagttcaatagcacctaccgggtggtgtccgtgctgaccgtgctgcaccaggactggctgaacggcaaggaatacaagtgtaaggtgtccaacaagggcctgcccagcagcatcgagaaaaccatcagcaaggccaagggccagcctcgggagccccaggtgtacaccctgccccctagccaagaggagatgaccaagaaccaggtgtccctgacctgcctggtgaagggcttctaccccagcgacatcgccgtggagtgggagagcaacggccagcccgagaacaactacaagaccaccccccctgtgctggacagcgacggcagcttcttcctgtacagccggctgaccgtggacaagagccggtggcaggagggcaacgtctttagctgctccgtgatgcacgaggccctgcacaaccactacacccagaagagcctgagcctgtccctgggcaagatg

SEQ ID NO: 1022 - protein, 282 aa, Artificial Sequence
  source: /note="Description of Artificial Sequence: Synthetic polypeptide"
RWPESPKAQASSVPTAQPQAEGSLAKATTAPATTRNTGRGGEEKKKEKEKEEQEERETKTPECPSHTQPLGVYLLTPAVQDLWLRDKATFTCFVVGSDLKDAHLTWEVAGKVPTGGVEEGLLERHSNGSQSQHSRLTLPRSLWNAGTSVTCTLNHPSLPPQRLMALREPAAQAPVKLSLNLLASSDPPEAASWLLCEVSGFSPPNILLMWLEDQREVNTSGFAPARPPPQPGSTTFWAWSVLRVPAPPSPQPATYTCVVSHEDSRTLLNASRSLEVSYVTDH

SEQ ID NO: 1023 - DNA, 847 bp, Artificial Sequence
  source: /note="Description of Artificial Sequence: Synthetic polynucleotide"
aggtggcccgaaagtcccaaggcccaggcatctagtgttcctactgcacagccccaggcagaaggcagcctagccaaagctactactgcacctgccactacgcgcaatactggccgtggcggggaggagaagaaaaaggagaaagagaaagaagaacaggaagagagggagaccaagacccctgaatgtccatcccatacccagccgctgggcgtctatctcttgactcccgcagtacaggacttgtggcttagagataaggccacctttacatgtttcgtcgtgggctctgacctgaaggatgcccatttgacttgggaggttgccggaaaggtacccacagggggggttgaggaagggttgctggagcgccattccaatggctctcagagccagcactcaagactcacccttccgagatccctgtggaacgccgggacctctgtcacatgtactctaaatcatcctagcctgcccccacagcgtctgatggcccttagagagccagccgcccaggcaccagttaagcttagcctgaatctgctcgccagtagtgatcccccagaggccgccagctggctcttatgcgaagtgtccggctttagcccgcccaacatcttgctcatgtggctggaggaccagcgagaagtgaacaccagcggcttcgctccagcccggcccccaccccagccgggttctaccacattctgggcctggagtgtcttaagggtcccagcaccacctagcccccagccagccacatacacctgtgttgtgtcccatgaagatagcaggaccctgctaaatgcttctaggagtctggaggtttcctacgtgactgaccatt

SEQ ID NO: 1024 - protein, 10 aa, Artificial Sequence
  source: /note="Description of Artificial Sequence: Synthetic peptide"
GGGGSGGGGS

SEQ ID NO: 1025 - DNA, 30 bp, Artificial Sequence
  source: /note="Description of Artificial Sequence: Synthetic oligonucleotide"
ggtggcggaggttctggaggtggaggttcc

SEQ ID NO: 1026 - protein, 24 aa, Artificial Sequence
  source: /note="Description of Artificial Sequence: Synthetic peptide"
IYIWAPLAGTCGVLLLSLVITLYC

SEQ ID NO: 1027 - DNA, 72 bp, Artificial Sequence
  source: /note="Description of Artificial Sequence: Synthetic oligonucleotide"
atctacatctgggcgcccttggccgggacttgtggggtccttctcctgtcactggttatcaccctttactgc

SEQ ID NO: 1028 - DNA, 72 bp, Artificial Sequence
  source: /note="Description of Artificial Sequence: Synthetic oligonucleotide"
atctacatttgggcccctctggctggtacttgcggggtcctgctgctttcactcgtgatcactctttactgt

SEQ ID NO: 1029 - protein, 42 aa, Artificial Sequence
  source: /note="Description of Artificial Sequence: Synthetic polypeptide"
KRGRKKLLYIFKQPFMRPVQTTQEEDGCSCRFPEEEEGGCEL

SEQ ID NO: 1030 - DNA, 126 bp, Artificial Sequence
  source: /note="Description of Artificial Sequence: Synthetic polynucleotide"
aaacggggcagaaagaaactcctgtatatattcaaacaaccatttatgagaccagtacaaactactcaagaggaagatggctgtagctgccgatttccagaagaagaagaaggaggatgtgaactg

SEQ ID NO: 1031 - DNA, 126 bp, Artificial Sequence
  source: /note="Description of Artificial Sequence: Synthetic polynucleotide"
aagcgcggtcggaagaagctgctgtacatctttaagcaacccttcatgaggcctgtgcagactactcaagaggaggacggctgttcatgccggttcccagaggaggaggaaggcggctgcgaactg

SEQ ID NO: 1032 - protein, 48 aa, Artificial Sequence
  source: /note="Description of Artificial Sequence: Synthetic polypeptide"
QRRKYRSNKGESPVEPAEPCRYSCPREEEGSTIPIQEDYRKPEPACSP

SEQ ID NO: 1033 - DNA, 123 bp, Artificial Sequence
  source: /note="Description of Artificial Sequence: Synthetic polynucleotide"
aggagtaagaggagcaggctcctgcacagtgactacatgaacatgactccccgccgccccgggcccacccgcaagcattaccagccctatgccccaccacgcgacttcgcagcctatcgctcc

SEQ ID NO: 1034 - protein, 112 aa, Artificial Sequence
  source: /note="Description of Artificial Sequence: Synthetic polypeptide"
RVKFSRSADAPAYKQGQNQLYNELNLGRREEYDVLDKRRGRDPEMGGKPRRKNPQEGLYNELQKDKMAEAYSEIGMKGERRRGKGHDGLYQGLSTATKDTYDALHMQALPPR

SEQ ID NO: 1035 - DNA, 336 bp, Artificial Sequence
  source: /note="Description of Artificial Sequence: Synthetic polynucleotide"
agagtgaagttcagcaggagcgcagacgcccccgcgtacaagcagggccagaaccagctctataacgagctcaatctaggacgaagagaggagtacgatgttttggacaagagacgtggccgggaccctgagatggggggaaagccgagaaggaagaaccctcaggaaggcctgtacaatgaactgcagaaagataagatggcggaggcctacagtgagattgggatgaaaggcgagcgccggaggggcaaggggcacgatggcctttaccagggtctcagtacagccaccaaggacacctacgacgcccttcacatgcaggccctgccccctcgc

SEQ ID NO: 1036 - DNA, 336 bp, Artificial Sequence
  source: /note="Description of Artificial Sequence: Synthetic polynucleotide"
cgcgtgaaattcagccgcagcgcagatgctccagcctacaagcaggggcagaaccagctctacaacgaactcaatcttggtcggagagaggagtacgacgtgctggacaagcggagaggacgggacccagaaatgggcgggaagccgcgcagaaagaatccccaagagggcctgtacaacgagctccaaaaggataagatggcagaagcctatagcgagattggtatgaaaggggaacgcagaagaggcaaaggccacgacggactgtaccagggactcagcaccgccaccaaggacacctatgacgctcttcacatgcaggccctgccgcctcgg

SEQ ID NO: 1037 - protein, 112 aa, Artificial Sequence
  source: /note="Description of Artificial Sequence: Synthetic polypeptide"
RVKFSRSADAPAYQQGQNQLYNELNLGRREEYDVLDKRRGRDPEMGGKPRRKNPQEGLYNELQKDKMAEAYSEIGMKGERRRGKGHDGLYQGLSTATKDTYDALHMQALPPR

SEQ ID NO: 1038 - DNA, 336 bp, Artificial Sequence
  source: /note="Description of Artificial Sequence: Synthetic polynucleotide"
agagtgaagttcagcaggagcgcagacgcccccgcgtaccagcagggccagaaccagctctataacgagctcaatctaggacgaagagaggagtacgatgttttggacaagagacgtggccgggaccctgagatggggggaaagccgagaaggaagaaccctcaggaaggcctgtacaatgaactgcagaaagataagatggcggaggcctacagtgagattgggatgaaaggcgagcgccggaggggcaaggggcacgatggcctttaccagggtctcagtacagccaccaaggacacctacgacgcccttcacatgcaggccctgccccctcgc

SEQ ID NO: 1039 - protein, 5 aa, Artificial Sequence
  source: /note="Description of Artificial Sequence: Synthetic peptide"
GGGGS

SEQ ID NO: 1040 - DNA, 30 bp, Artificial Sequence; identical to SEQ ID NO: 1025
  source: /note="Description of Artificial Sequence: Synthetic oligonucleotide"

SEQ ID NO: 1041 - protein, 150 aa, Artificial Sequence [sequence omitted]

SEQ ID NO: 1042 - DNA, 450 bp, Artificial Sequence
  source: /note="Description of Artificial Sequence: Synthetic polynucleotide"
cccggatggtttctggactctccggatcgcccgtggaatcccccaaccttctcaccggcactcttggttgtgactgagggcgataatgcgaccttcacgtgctcgttctccaacacctccgaatcattcgtgctgaactggtaccgcatgagcccgtcaaaccagaccgacaagctcgccgcgtttccggaagatcggtcgcaaccgggacaggattgtcggttccgcgtgactcaactgccgaatggcagagacttccacatgagcgtggtccgcgctaggcgaaacgactccgggacctacctgtgcggagccatctcgctggcgcctaaggcccaaatcaaagagagcttgagggccgaactgagagtgaccgagcgcagagctgaggtgccaactgcacatccatccccatcgcctcggcctgcggggcagtttcagaccctggtc

SEQ ID NO: 1043 - protein, 394 aa, Artificial Sequence
  source: /note="Description of Artificial Sequence: Synthetic polypeptide"
MALPVTALLLPLALLLHAARPPGWFLDSPDRPWNPPTFSPALLVVTEGDNATFTCSFSNTSESFVLNWYRMSPSNQTDKLAAFPEDRSQPGQDCRFRVTQLPNGRDFHMSVVRARRNDSGTYLCGAISLAPKAQIKESLRAELRVTERRAEVPTAHPSPSPRPAGQFQTLVTTTPAPRPPTPAPTIASQPLSLRPEACRPAAGGAVHTRGLDFACDIYIWAPLAGTCGVLLLSLVITLYCKRGRKKLLYIFKQPFMRPVQTTQEEDGCSCRFPEEEEGGCELRVKFSRSADAPAYKQGQNQLYNELNLGRREEYDVLDKRRGRDPEMGGKPRRKNPQEGLYNELQKDKMAEAYSEIGMKGERRRGKGHDGLYQGLSTATKDTYDALHMQALPPR

SEQ ID NO: 1044 - DNA, 1182 bp, Artificial Sequence
  source: /note="Description of Artificial Sequence: Synthetic polynucleotide"
atggccctccctgtcactgccctgcttctccccctcgcactcctgctccacgccgctagaccacccggatggtttctggactctccggatcgcccgtggaatcccccaaccttctcaccggcactcttggttgtgactgagggcgataatgcgaccttcacgtgctcgttctccaacacctccgaatcattcgtgctgaactggtaccgcatgagcccgtcaaaccagaccgacaagctcgccgcgtttccggaagatcggtcgcaaccgggacaggattgtcggttccgcgtgactcaactgccgaatggcagagacttccacatgagcgtggtccgcgctaggcgaaacgactccgggacctacctgtgcggagccatctcgctggcgcctaaggcccaaatcaaagagagcttgagggccgaactgagagtgaccgagcgcagagctgaggtgccaactgcacatccatccccatcgcctcggcctgcggggcagtttcagaccctggtcacgaccactccggcgccgcgcccaccgactccggccccaactatcgcgagccagcccctgtcgctgaggccggaagcatgccgccctgccgccggaggtgctgtgcatacccggggattggacttcgcatgcgacatctacatttgggctcctctcgccggaacttgtggcgtgctccttctgtccctggtcatcaccctgtactgcaagcggggtcggaaaaagcttctgtacattttcaagcagcccttcatgaggcccgtgcaaaccacccaggaggaggacggttgctcctgccggttccccgaagaggaagaaggaggttgcgagctgcgcgtgaagttctcccggagcgccgacgcccccgcctataagcagggccagaaccagctgtacaacgaactgaacctgggacggcgggaagagtacgatgtgctggacaagcggcgcggccgggaccccgaaatgggcgggaagcctagaagaaagaaccctcaggaaggcctgtataacgagctgcagaaggacaagatggccgaggcctactccgaaattgggatgaagggagagcggcggaggggaaaggggcacgacggcctgtaccaaggactgtccaccgccaccaaggacacatacgatgccctgcacatgcaggcccttccccctcgc

SEQ ID NO: 1045 - protein, 17 aa, Artificial Sequence
  source: /note="Description of Artificial Sequence: Synthetic peptide"
ASGGGGSGGRASGGGGS

SEQ ID NO: 1046 - protein, 373 aa, Artificial Sequence
  source: /note="Description of Artificial Sequence: Synthetic polypeptide"
PGWFLDSPDRPWNPPTFSPALLVVTEGDNATFTCSFSNTSESFVLNWYRMSPSNQTDKLAAFPEDRSQPGQDCRFRVTQLPNGRDFHMSVVRARRNDSGTYLCGAISLAPKAQIKESLRAELRVTERRAEVPTAHPSPSPRPAGQFQTLVTTTPAPRPPTPAPTIASQPLSLRPEACRPAAGGAVHTRGLDFACDIYIWAPLAGTCGVLLLSLVITLYCKRGRKKLLYIFKQPFMRPVQTTQEEDGCSCRFPEEEEGGCELRVKFSRSADAPAYKQGQNQLYNELNLGRREEYDVLDKRRGRDPEMGGKPRRKNPQEGLYNELQKDKMAEAYSEIGMKGERRRGKGHDGLYQGLSTATKDTYDALHMQALPPR

SEQ ID NO: 1047 - protein, 35 aa, Artificial Sequence
  source: /note="Description of Artificial Sequence: Synthetic polypeptide"
TKKKYSSSVHDPNGEYMFMRAVNTAKKSRLTDVTL

SEQ ID NO: 1048 - DNA, 105 bp, Artificial Sequence
  source: /note="Description of Artificial Sequence: Synthetic polynucleotide"
acaaaaaagaagtattcatccagtgtgcacgaccctaacggtgaatacatgttcatgagagcagtgaacacagccaaaaaatccagactcacagatgtgacccta

SEQ ID NO: 1049 - protein, 69 aa, Artificial Sequence
  source: /note="Description of Artificial Sequence: Synthetic polypeptide"
TTTPAPRPPTPAPTIASQPLSLRPEACRPAAGGAVHTRGLDFACDFWLPIGCAAFVVVCILGCILICWL

SEQ ID NO: 1050 - DNA, 207 bp, Artificial Sequence
  source: /note="Description of Artificial Sequence: Synthetic polynucleotide"
accacgacgccagcgccgcgaccaccaacaccggcgcccaccatcgcgtcgcagcccctgtccctgcgcccagaggcgtgccggccagcggcggggggcgcagtgcacacgagggggctggacttcgcctgtgatttctggttacccataggatgtgcagcctttgttgtagtctgcattttgggatgcatacttatttgttggctt

SEQ ID NO: 1051 - protein, 41 aa, Artificial Sequence
  source: /note="Description of Artificial Sequence: Synthetic polypeptide"
RSKRSRLLHSDYMNMTPRRPGPTRKHYQPYAPPRDFAAYRS

SEQ ID NO: 1052 - DNA, 123 bp, Artificial Sequence; identical to SEQ ID NO: 1033
  source: /note="Description of Artificial Sequence: Synthetic polynucleotide"

SEQ ID NO: 1053 - protein, 486 aa, Artificial Sequence
  source: /note="Description of Artificial Sequence: Synthetic polypeptide"
MALPVTALLLPLALLLHAARPDIQMTQTTSSLSASLGDRVTISCRASQDISKYLNWYQQKPDGTVKLLIYHTSRLHSGVPSRFSGSGSGTDYSLTISNLEQEDIATYFCQQGNTLPYTFGGGTKLEITGGGGSGGGGSGGGGSEVKLQESGPGLVAPSQSLSVTCTVSGVSLPDYGVSWIRQPPRKGLEWLGVIWGSETTYYNSALKSRLTIIKDNSKSQVFLKMNSLQTDDTAIYYCAKHYYYGGSYAMDYWGQGTSVTVSSTTTPAPRPPTPAPTIASQPLSLRPEACRPAAGGAVHTRGLDFACDIYIWAPLAGTCGVLLLSLVITLYCKRGRKKLLYIFKQPFMRPVQTTQEEDGCSCRFPEEEEGGCELRVKFSRSADAPAYKQGQNQLYNELNLGRREEYDVLDKRRGRDPEMGGKPRRKNPQEGLYNELQKDKMAEAYSEIGMKGERRRGKGHDGLYQGLSTATKDTYDALHMQALPPR

SEQ ID NO: 1054 - protein, 465 aa, Artificial Sequence; identical to SEQ ID NO: 26
  source: /note="Description of Artificial Sequence: Synthetic polypeptide"

SEQ ID NO: 1055 - protein, 486 aa, Artificial Sequence; identical to SEQ ID NO: 1053
  source: /note="Description of Artificial Sequence: Synthetic polypeptide"

SEQ ID NO: 1056 - DNA, 1458 bp, Artificial Sequence
  source: /note="Description of Artificial Sequence: Synthetic polynucleotide"
atggccttaccagtgaccgccttgctcctgccgctggccttgctgctccacgccgccaggccggacatccagatgacacagactacatcctccctgtctgcctctctgggagacagagtcaccatcagttgcagggcaagtcaggacattagtaaatatttaaattggtatcagcagaaaccagatggaactgttaaactcctgatctaccatacatcaagattacactcaggagtcccatcaaggttcagtggcagtgggtctggaacagattattctctcaccattagcaacctggagcaagaagatattgccacttacttttgccaacagggtaatacgcttccgtacacgttcggaggggggaccaagctggagatcacaggtggcggtggctcgggcggtggtgggtcgggtggcggcggatctgaggtgaaactgcaggagtcaggacctggcctggtggcgccctcacagagcctgtccgtcacatgcactgtctcaggggtctcattacccgactatggtgtaagctggattcgccagcctccacgaaagggtctggagtggctgggagtaatatggggtagtgaaaccacatactataattcagctctcaaatccagactgaccatcatcaaggacaactccaagagccaagttttcttaaaaatgaacagtctgcaaactgatgacacagccatttactactgtgccaaacattattactacggtggtagctatgctatggactactggggccaaggaacctcagtcaccgtctcctcaaccacgacgccagcgccgcgaccaccaacaccggcgcccaccatcgcgtcgcagcccctgtccctgcgcccagaggcgtgccggccagcggcggggggcgcagtgcacacgagggggctggacttcgcctgtgatatctacatctgggcgcccttggccgggacttgtggggtccttctcctgtcactggttatcaccctttactgcaaacggggcagaaagaaactcctgtatatattcaaacaaccatttatgagaccagtacaaactactcaagaggaagatggctgtagctgccgatttccagaagaagaagaaggaggatgtgaactgagagtgaagttcagcaggagcgcagacgcccccgcgtacaagcagggccagaaccagctctataacgagctcaatctaggacgaagagaggagtacgatgttttggacaagagacgtggccgggaccctgagatggggggaaagccgagaaggaagaaccctcaggaaggcctgtacaatgaactgcagaaagataagatggcggaggcctacagtgagattgggatgaaaggcgagcgccggaggggcaaggggcacgatggcctttaccagggtctcagtacagccaccaaggacacctacgacgcccttcacatgcaggccctgccccctcgc

SEQ ID NO: 1057 - protein, 242 aa, Artificial Sequence; identical to SEQ ID NO: 15
  source: /note="Description of Artificial Sequence: Synthetic polypeptide"

SEQ ID NO: 1058 - protein, 244 aa, Artificial Sequence
  source: /note="Description of Artificial Sequence: Synthetic polypeptide"
QVQLLESGAELVRPGSSVKISCKASGYAFSSYWMNWVKQRPGQGLEWIGQIYPGDGDTNYNGKFKGQATLTADKSSSTAYMQLSGLTSEDSAVYSCARKTISSVVDFYFDYWGQGTTVTGGGSGGGSGGGSGGGSELVLTQSPKFMSTSVGDRVSVTCKASQNVGTNVAWYQQKPGQSPKPLIYSATYRNSGVPDRFTGSGSGTDFTLTITNVQSKDLADYFCQYNRYPYTSFFFTKLEIKRRS

SEQ ID NO: 1059 - protein, 464 aa, Artificial Sequence
  source: /note="Description of Artificial Sequence: Synthetic polypeptide"
QVQLLESGAELVRPGSSVKISCKASGYAFSSYWMNWVKQRPGQGLEWIGQIYPGDGDTNYNGKFKGQATLTADKSSSTAYMQLSGLTSEDSAVYSCARKTISSVVDFYFDYWGQGTTVTGGGSGGGSGGGSGGGSELVLTQSPKFMSTSVGDRVSVTCKASQNVGTNVAWYQQKPGQSPKPLIYSATYRNSGVPDRFTGSGSGTDFTLTITNVQSKDLADYFCQYNRYPYTSFFFTKLEIKRRSKIEVMYPPPYLDNEKSNGTIIHVKGKHLCPSPLFPGPSKPFWVLVVVGGVLACYSLLVTVAFIIFWVRSKRSRLLHSDYMNMTPRRPGPTRKHYQPYAPPRDFAAYRSRVKFSRSADAPAYQQGQNQLYNELNLGRREEYDVLDKRRGRDPEMGGKPRRKNPQEGLYNELQKDKMAEAYSEIGMKGERRRGKGHDGLYQGLSTATKDTYDALHMQALPPR

SEQ ID NO: 1060 - protein, 246 aa, Artificial Sequence
  source: /note="Description of Artificial Sequence: Synthetic polypeptide"
DIQMTQTTSSLSASLGDRVTISCRASQDISKYLNWYQQKPDGTVKLLIYHTSRLHSGVPSRFSGSGSGTDYSLTISNLEQEDIATYFCQQGNTLPYTFGGGTKLEITGSTSGSGKPGSGEGSTKGEVKLQESGPGLVAPSQSLSVTCTVSGVSLPDYGVSWIRQPPRKGLEWLGVIWGSETTYYNSALKSRLTIIKDNSKSQVFLKMNSLQTDDTAIYYCAKHYYYGGSYAMDYWGQGTSVTVSSE

SEQ ID NO: 1061 - protein, 439 aa, Artificial Sequence
  source: /note="Description of Artificial Sequence: Synthetic polypeptide"
DIQMTQTTSSLSASLGDRVTISCRASQDISKYLNWYQQKPDGTVKLLIYHTSRLHSGVPSRFSGSGSGTDYSLTISNLEQEDIATYFCQQGNTLPYTFGGGTKLEITGSTSGSGKPGSGEGSTKGEVKLQESGPGLVAPSQSLSVTCTVSGVSLPDYGVSWIRQPPRKGLEWLGVIWGSETTYYNSALKSRLTIIKDNSKSQVFLKMNSLQTDDTAIYYCAKHYYYGGSYAMDYWGQGTSVTVSSESKYGPPCPPCPMFWVLVVVGGVLACYSLLVTVAFIIFWVKRGRKKLLYIFKQPFMRPVQTTQEEDGCSCRFEEEEGGCELRVKFSRSADAPAYQQGQNQLYNELNLGRREEYDVLDKRRGRDPEMGGKPRRKNPQEGLYNELQKDKMAEAYSEIGMKGERRRGKGHDGLYQGLSTATKDTYDALHMQALPPRL

SEQ ID NO: 1062 - protein, 819 aa, Artificial Sequence
  source: /note="Description of Artificial Sequence: Synthetic polypeptide"
DIQMTQTTSSLSASLGDRVTISCRASQDISKYLNWYQQKPDGTVKLLIYHTSRLHSGVPSRFSGSGSGTDYSLTISNLEQEDIATYFCQQGNTLPYTFGGGTKLEITGSTSGSGKPGSGEGSTKGEVKLQESGPGLVAPSQSLSVTCTVSGVSLPDYGVSWIRQPPRKGLEWLGVIWGSETTYYNSALKSRLTIIKDNSKSQVFLKMNSLQTDDTAIYYCAKHYYYGGSYAMDYWGQGTSVTVSSESKYGPPCPPCPMFWVLVVVGGVLACYSLLVTVAFIIFWVKRGRKKLLYIFKQPFMRPVQTTQEEDGCSCRFEEEEGGCELRVKFSRSADAPAYQQGQNQLYNELNLGRREEYDVLDKRRGRDPEMGGKPRRKNPQEGLYNELQKDKMAEAYSEIGMKGERRRGKGHDGLYQGLSTATKDTYDALHMQALPPRLEGGGEGRGSLLTCGDVEENPGPRMLLLVTSLLLCELPHPAFLLIPRKVCNGIGIGEFKDSLSINATNIKHFKNCTSISGDLHILPVAFRGDSFTHTPPLDPQELDILKTVKEITGFLLIQAWPENRTDLHAFENLEIIRGRTKQHGQFSLAVVSLNITSLGLRSLKEISDGDVIISGNKNLCYANTINWKKLFGTSGQKTKIISNRGENSCKATGQVCHALCSPEGCWGPEPRDCVSCRNVSRGRECVDKCNLLEGEPREFVENSECIQCHPECLPQAMNITCTGRGPDNCIQCAHYIDGPHCVKTCPAGVMGENNTLVWKYADAGHVCHLCHPNCTYGCTGPGLEGCPTNGPKIPSIATGMVGALLLLLVVALGIGLFM

SEQ ID NO: 1063 - protein, 245 aa, Artificial Sequence
  source: /note="Description of Artificial Sequence: Synthetic polypeptide"
DIQMTQTTSSLSASLGDRVTISCRASQDISKYLNWYQQKPDGTVKLLIYHTSRLHSGVPSRFSGSGSGTDYSLTISNLEQEDIATYFCQQGNTLPYTFGGGTKLEITGSTSGSGKPGSGEGSTKGEVKLQESGPGLVAPSQSLSVTCTVSGVSLPDYGVSWIRQPPRKGLEWLGVIWGSETTYYNSALKSRLTIIKDNSKSQVFLKMNSLQTDDTAIYYCAKHYYYGGSYAMDYWGQGTSVTVSS

SEQ ID NO: 1064 - protein, 467 aa, Artificial Sequence
  source: /note="Description of Artificial Sequence: Synthetic polypeptide"
DIQMTQTTSSLSASLGDRVTISCRASQDISKYLNWYQQKPDGTVKLLIYHTSRLHSGVPSRFSGSGSGTDYSLTISNLEQEDIATYFCQQGNTLPYTFGGGTKLEITGSTSGSGKPGSGEGSTKGEVKLQESGPGLVAPSQSLSVTCTVSGVSLPDYGVSWIRQPPRKGLEWLGVIWGSETTYYNSALKSRLTIIKDNSKSQVFLKMNSLQTDDTAIYYCAKHYYYGGSYAMDYWGQGTSVTVSSAAAIEVMYPPPYLDNEKSNGTIIHVKGKHLCPSPLFPGPSKPFWVLVVVGGVLACYSLLVTVAFIIFWVRSKRSRLLHSDYMNMTPRRPGPTRKHYQPYAPPRDFAAYRSRVKFSRSADAPAYQQGQNQLYNELNLGRREEYDVLDKRRGRDPEMGGKPRRKNPQEGLYNELQKDKMAEAYSEIGMKGERRRGKGHDGLYQGLSTATKDTYDALHMQALPPR

SEQ ID NO: 1065 - protein, 119 aa, Artificial Sequence
  source: /note="Description of Artificial Sequence: Synthetic polypeptide"
QVQLLESGAELVRPGSSVKISCKASGYAFSSYWMNWVKQRPGQGLEWIGQIYPGDGDTNYNGKFKGQATLTADKSSSTAYMQLSGLTSEDSAVYSCARKTISSVVDFYFDYWGQGTTVT

SEQ ID NO: 1066 - protein, 111 aa, Artificial Sequence
  source: /note="Description of Artificial Sequence: Synthetic polypeptide"
ELVLTQSPKFMSTSVGDRVSVTCKASQNVGTNVAWYQQKPGQSPKPLIYSATYRNSGVPDRFTGSGSGTDFTLTITNVQSKDLADYFYFCQYNRYPYTSGGGTKLEIKRRS

SEQ ID NO: 1067 - protein, 242 aa, Artificial Sequence
  source: /note="Description of Artificial Sequence: Synthetic polypeptide"
EIVMTQSPATLSLSPGERATLSCRASQDISKYLNWYQQKPGQAPRLLIYHTSRLHSGIPARFSGSGSGTDYTLTISSLQPEDFAVYFCQQGNTLPYTFGQGTKLEIKGGGGSGGGGSGGGGSQVQLQESGPGLVKPSETLSLTCTVSGVSLPDYGVSWIRQPPGKGLEWIGVIWGSETTYYSSSLKSRVTISKDNSKNQVSLKLSSVTAADTAVYYCAKHYYYGGSYAMDYWGQGTLVTVSS

SEQ ID NO: 1068 - protein, 486 aa, Artificial Sequence
  source: /note="Description of Artificial Sequence: Synthetic polypeptide"
MALPVTALLLPLALLLHAARPEIVMTQSPATLSLSPGERATLSCRASQDISKYLNWYQQKPGQAPRLLIYHTSRLHSGIPARFSGSGSGTDYTLTISSLQPEDFAVYFCQQGNTLPYTFGQGTKLEIKGGGGSGGGGSGGGGSQVQLQESGPGLVKPSETLSLTCTVSGVSLPDYGVSWIRQPPGKGLEWIGVIWGSETTYYSSSLKSRVTISKDNSKNQVSLKLSSVTAADTAVYYCAKHYYYGGSYAMDYWGQGTLVTVSSTTTPAPRPPTPAPTIASQPLSLRPEACRPAAGGAVHTRGLDFACDIYIWAPLAGTCGVLLLSLVITLYCKRGRKKLLYIFKQPFMRPVQTTQEEDGCSCRFPEEEEGGCELRVKFSRSADAPAYKQGQNQLYNELNLGRREEYDVLDKRRGRDPEMGGKPRRKNPQEGLYNELQKDKMAEAYSEIGMKGERRRGKGHDGLYQGLSTATKDTYDALHMQALPPR

SEQ ID NO: 1069 - protein, 242 aa, Artificial Sequence
  source: /note="Description of Artificial Sequence: Synthetic polypeptide"
EIVMTQSPATLSLSPGERATLSCRASQDISKYLNWYQQKPGQAPRLLIYHTSRLHSGIPARFSGSGSGTDYTLTISSLQPEDFAVYFCQQGNTLPYTFGQGTKLEIKGGGGSGGGGSGGGGSQVQLQESGPGLVKPSETLSLTCTVSGVSLPDYGVSWIRQPPGKGLEWIGVIWGSETTYYQSSLKSRVTISKDNSKNQVSLKLSSVTAADTAVYYCAKHYYYGGSYAMDYWGQGTLVTVSS

SEQ ID NO: 1070 - DNA, 813 bp, Artificial Sequence
  source: /note="Description of Artificial Sequence: Synthetic polynucleotide"
atggccctccctgtcaccgccctgctgcttccgctggctcttctgctccacgccgctcggcccgaaattgtgatgacccagtcacccgccactcttagcctttcacccggtgagcgcgcaaccctgtcttgcagagcctcccaagacatctcaaaataccttaattggtatcaacagaagcccggacaggctcctcgccttctgatctaccacaccagccggctccattctggaatccctgccaggttcagcggtagcggatctgggaccgactacaccctcactatcagctcactgcagccagaggacttcgctgtctatttctgtcagcaagggaacaccctgccctacacctttggacagggcaccaagctcgagattaaaggtggaggtggcagcggaggaggtgggtccggcggtggaggaagccaggtccaactccaagaaagcggaccgggtcttgtgaagccatcagaaactctttcactgacttgtactgtgagcggagtgtctctccccgattacggggtgtcttggatcagacagccaccggggaagggtctggaatggattggagtgatttggggctctgagactacttactaccaatcatccctcaagtcacgcgtcaccatctcaaaggacaactctaagaatcaggtgtcactgaaactgtcatctgtgaccgcagccgacaccgccgtgtactattgcgctaagcattactattatggcgggagctacgcaatggattactggggacagggtactctggtcaccgtgtccagccaccaccatcatcaccatcaccat

SEQ ID NO: 1071 - protein, 486 aa, Artificial Sequence
  source: /note="Description of Artificial Sequence: Synthetic polypeptide"
MALPVTALLLPLALLLHAARPEIVMTQSPATLSLSPGERATLSCRASQDISKYLNWYQQKPGQAPRLLIYHTSRLHSGIPARFSGSGSGTDYTLTISSLQPEDFAVYFCQQGNTLPYTFGQGTKLEIKGGGGSGGGGSGGGGSQVQLQESGPGLVKPSETLSLTCTVSGVSLPDYGVSWIRQPPGKGLEWIGVIWGSETTYYQSSLKSRVTISKDNSKNQVSLKLSSVTAADTAVYYCAKHYYYGGSYAMDYWGQGTLVTVSSTTTPAPRPPTPAPTIASQPLSLRPEACRPAAGGAVHTRGLDFACDIYIWAPLAGTCGVLLLSLVITLYCKRGRKKLLYIFKQPFMRPVQTTQEEDGCSCRFPEEEEGGCELRVKFSRSADAPAYKQGQNQLYNELNLGRREEYDVLDKRRGRDPEMGGKPRRKNPQEGLYNELQKDKMAEAYSEIGMKGERRRGKGHDGLYQGLSTATKDTYDALHMQALPPR

SEQ ID NO: 1072 - DNA, 1458 bp, Artificial Sequence
  source: /note="Description of Artificial Sequence: Synthetic polynucleotide"
atggccctccctgtcaccgccctgctgcttccgctggctcttctgctccacgccgctcggcccgaaattgtgatgacccagtcacccgccactcttagcctttcacccggtgagcgcgcaaccctgtcttgcagagcctcccaagacatctcaaaataccttaattggtatcaacagaagcccggacaggctcctcgccttctgatctaccacaccagccggctccattctggaatccctgccaggttcagcggtagcggatctgggaccgactacaccctcactatcagctcactgcagccagaggacttcgctgtctatttctgtcagcaagggaacaccctgccctacacctttggacagggcaccaagctcgagattaaaggtggaggtggcagcggaggaggtgggtccggcggtggaggaagccaggtccaactccaagaaagcggaccgggtcttgtgaagccatcagaaactctttcactgacttgtactgtgagcggagtgtctctccccgattacggggtgtcttggatcagacagccaccggggaagggtctggaatggattggagtgatttggggctctgagactacttactaccaatcatccctcaagtcacgcgtcaccatctcaaaggacaactctaagaatcaggtgtcactgaaactgtcatctgtgaccgcagccgacaccgccgtgtactattgcgctaagcattactattatggcgggagctacgcaatggattactggggacagggtactctggtcaccgtgtccagcaccactaccccagcaccgaggccacccaccccggctcctaccatcgcctcccagcctctgtccctgcgtccggaggcatgtagacccgcagctggtggggccgtgcatacccggggtcttgacttcgcctgcgatatctacatttgggcccctctggctggtacttgcggggtcctgctgctttcactcgtgatcactctttactgtaagcgcggtcggaagaagctgctgtacatctttaagcaacccttcatgaggcctgtgcagactactcaagaggaggacggctgttcatgccggttcccagaggaggaggaaggcggctgcgaactgcgcgtgaaattcagccgcagcgcagatgctccagcctacaagcaggggcagaaccagctctacaacgaactcaatcttggtcggagagaggagtacgacgtgctggacaagcggagaggacgggacccagaaatgggcgggaagccgcgcagaaagaatccccaagagggcctgtacaacgagctccaaaaggataagatggcagaagcctatagcgagattggtatgaaaggggaacgcagaagaggcaaaggccacgacggactgtaccagggactcagcaccgccaccaaggacacctatgacgctcttcacatgcaggccctgccgcctcgg

SEQ ID NO: 1073 - protein, 271 aa, Artificial Sequence
  source: /note="Description of Artificial Sequence: Synthetic polypeptide"
MALPVTALLLPLALLLHAARPEIVMTQSPATLSLSPGERATLSCRASQDISKYLNWYQQKPGQAPRLLIYHTSRLHSGIPARFSGSGSGTDYTLTISSLQPEDFAVYFCQQGNTLPYTFGQGTKLEIKGGGGSGGGGSGGGGSQVQLQESGPGLVKPSETLSLTCTVSGVSLPDYGVSWIRQPPGKGLEWIGVIWGSETTYYQSSLKSRVTISKDNSKNQVSLKLSSVTAADTAVYYCAKHYYYGGSYAMDYWGQGTLVTVSSHHHHHHHH

SEQ ID NO: 1074 - protein, 242 aa, Artificial Sequence
  source: /note="Description of Artificial Sequence: Synthetic polypeptide"
QVQLQESGPGLVKPSETLSLTCTVSGVSLPDYGVSWIRQPPGKGLEWIGVIWGSETTYYSSSLKSRVTISKDNSKNQVSLKLSSVTAADTAVYYCAKHYYYGGSYAMDYWGQGTLVTVSSGGGGSGGGGSGGGGSEIVMTQSPATLSLSPGERATLSCRASQDISKYLNWYQQKPGQAPRLLIYHTSRLHSGIPARFSGSGSGTDYTLTISSLQPEDFAVYFCQQGNTLPYTFGQGTKLEIK

SEQ ID NO: 1075 - protein, 486 aa, Artificial Sequence
  source: /note="Description of Artificial Sequence: Synthetic polypeptide"
MALPVTALLLPLALLLHAARPQVQLQESGPGLVKPSETLSLTCTVSGVSLPDYGVSWIRQPPGKGLEWIGVIWGSETTYYSSSLKSRVTISKDNSKNQVSLKLSSVTAADTAVYYCAKHYYYGGSYAMDYWGQGTLVTVSSGGGGSGGGGSGGGGSEIVMTQSPATLSLSPGERATLSCRASQDISKYLNWYQQKPGQAPRLLIYHTSRLHSGIPARFSGSGSGTDYTLTISSLQPEDFAVYFCQQGNTLPYTFGQGTKLEIKTTTPAPRPPTPAPTIASQPLSLRPEACRPAAGGAVHTRGLDFACDIYIWAPLAGTCGVLLLSLVITLYCKRGRKKLLYIFKQPFMRPVQTTQEEDGCSCRFPEEEEGGCELRVKFSRSADAPAYKQGQNQLYNELNLGRREEYDVLDKRRGRDPEMGGKPRRKNPQEGLYNELQKDKMAEAYSEIGMKGERRRGKGHDGLYQGLSTATKDTYDALHMQALPPR

SEQ ID NO: 1076 - protein, 242 aa, Artificial Sequence
  source: /note="Description of Artificial Sequence: Synthetic polypeptide"
QVQLQESGPGLVKPSETLSLTCTVSGVSLPDYGVSWIRQPPGKGLEWIGVIWGSETTYYQSSLKSRVTISKDNSKNQVSLKLSSVTAADTAVYYCAKHYYYGGSYAMDYWGQGTLVTVSSGGGGSGGGGSGGGGSEIVMTQSPATLSLSPGERATLSCRASQDISKYLNWYQQKPGQAPRLLIYHTSRLHSGIPARFSGSGSGTDYTLTISSLQPEDFAVYFCQQGNTLPYTFGQGTKLEIK

SEQ ID NO: 1077 - protein, 486 aa, Artificial Sequence
  source: /note="Description of Artificial Sequence: Synthetic polypeptide"
MALPVTALLLPLALLLHAARPQVQLQESGPGLVKPSETLSLTCTVSGVSLPDYGVSWIRQPPGKGLEWIGVIWGSETTYYQSSLKSRVTISKDNSKNQVSLKLSSVTAADTAVYYCAKHYYYGGSYAMDYWGQGTLVTVSSGGGGSGGGGSGGGGSEIVMTQSPATLSLSPGERATLSCRASQDISKYLNWYQQKPGQAPRLLIYHTSRLHSGIPARFSGSGSGTDYTLTISSLQPEDFAVYFCQQGNTLPYTFGQGTKLEIKTTTPAPRPPTPAPTIASQPLSLRPEACRPAAGGAVHTRGLDFACDIYIWAPLAGTCGVLLLSLVITLYCKRGRKKLLYIFKQPFMRPVQTTQEEDGCSCRFPEEEEGGCELRVKFSRSADAPAYKQGQNQLYNELNLGRREEYDVLDKRRGRDPEMGGKPRRKNPQEGLYNELQKDKMAEAYSEIGMKGERRRGKGHDGLYQGLSTATKDTYDALHMQALPPR

SEQ ID NO: 1078 - protein, 247 aa, Artificial Sequence
  source: /note="Description of Artificial Sequence: Synthetic polypeptide"
EIVMTQSPATLSLSPGERATLSCRASQDISKYLNWYQQKPGQAPRLLIYHTSRLHSGIPARFSGSGSGTDYTLTISSLQPEDFAVYFCQQGNTLPYTFGQGTKLEIKGGGGSGGGGSGGGGSGGGGSQVQLQESGPGLVKPSETLSLTCTVSGVSLPDYGVSWIRQPPGKGLEWIGVIWGSETTYYSSSLKSRVTISKDNSKNQVSLKLSSVTAADTAVYYCAKHYYYGGSYAMDYWGQGTLVTVSS

SEQ ID NO: 1079 - protein, 491 aa, Artificial Sequence
  source: /note="Description of Artificial Sequence: Synthetic polypeptide"
MALPVTALLLPLALLLHAARPEIVMTQSPATLSLSPGERATLSCRASQDISKYLNWYQQKPGQAPRLLIYHTSRLHSGIPARFSGSGSGTDYTLTISSLQPEDFAVYFCQQGNTLPYTFGQGTKLEIKGGGGSGGGGSGGGGSGGGGSQVQLQESGPGLVKPSETLSLTCTVSGVSLPDYGVSWIRQPPGKGLEWIGVIWGSETTYYSSSLKSRVTISKDNSKNQVSLKLSSVTAADTAVYYCAKHYYYGGSYAMDYWGQGTLVTVSSTTTPAPRPPTPAPTIASQPLSLRPEACRPAAGGAVHTRGLDFACDIYIWAPLAGTCGVLLLSLVITLYCKRGRKKLLYIFKQPFMRPVQTTQEEDGCSCRFPEEEEGGCELRVKFSRSADAPAYKQGQNQLYNELNLGRREEYDVLDKRRGRDPEMGGKPRRKNPQEGLYNELQKDKMAEAYSEIGMKGERRRGKGHDGLYQGLSTATKDTYDALHMQALPPR

SEQ ID NO: 1080 - protein, 247 aa, Artificial Sequence
  source: /note="Description of Artificial Sequence: Synthetic polypeptide"
EIVMTQSPATLSLSPGERATLSCRASQDISKYLNWYQQKPGQAPRLLIYHTSRLHSGIPARFSGSGSGTDYTLTISSLQPEDFAVYFCQQGNTLPYTFGQGTKLEIKGGGGSGGGGSGGGGSGGGGSQVQLQESGPGLVKPSETLSLTCTVSGVSLPDYGVSWIRQPPGKGLEWIGVIWGSETTYYQSSLKSRVTISKDNSKNQVSLKLSSVTAADTAVYYCAKHYYYGGSYAMDYWGQGTLVTVSS

SEQ ID NO: 1081 - protein, 491 aa, Artificial Sequence
  source: /note="Description of Artificial Sequence: Synthetic polypeptide"
MALPVTALLLPLALLLHAARPEIVMTQSPATLSLSPGERATLSCRASQDISKYLNWYQQKPGQAPRLLIYHTSRLHSGIPARFSGSGSGTDYTLTISSLQPEDFAVYFCQQGNTLPYTFGQGTKLEIKGGGGSGGGGSGGGGSGGGGSQVQLQESGPGLVKPSETLSLTCTVSGVSLPDYGVSWIRQPPGKGLEWIGVIWGSETTYYQSSLKSRVTISKDNSKNQVSLKLSSVTAADTAVYYCAKHYYYGGSYAMDYWGQGTLVTVSSTTTPAPRPPTPAPTIASQPLSLRPEACRPAAGGAVHTRGLDFACDIYIWAPLAGTCGVLLLSLVITLYCKRGRKKLLYIFKQPFMRPVQTTQEEDGCSCRFPEEEEGGCELRVKFSRSADAPAYKQGQNQLYNELNLGRREEYDVLDKRRGRDPEMGGKPRRKNPQEGLYNELQKDKMAEAYSEIGMKGERRRGKGHDGLYQGLSTATKDTYDALHMQALPPR

SEQ ID NO: 1082 - protein, 247 aa, Artificial Sequence
  source: /note="Description of Artificial Sequence: Synthetic polypeptide"
QVQLQESGPGLVKPSETLSLTCTVSGVSLPDYGVSWIRQPPGKGLEWIGVIWGSETTYYSSSLKSRVTISKDNSKNQVSLKLSSVTAADTAVYYCAKHYYYGGSYAMDYWGQGTLVTVSSGGGGSGGGGSGGGGSGGGGSEIVMTQSPATLSLSPGERATLSCRASQDISKYLNWYQQKPGQAPRLLIYHTSRLHSGIPARFSGSGSGTDYTLTISSLQPEDFAVYFCQQGNTLPYTFGQGTKLEIK

SEQ ID NO: 1083 - protein, 491 aa, Artificial Sequence
  source: /note="Description of Artificial Sequence: Synthetic polypeptide"
MALPVTALLLPLALLLHAARPQVQLQESGPGLVKPSETLSLTCTVSGVSLPDYGVSWIRQPPGKGLEWIGVIWGSETTYYSSSLKSRVTISKDNSKNQVSLKLSSVTAADTAVYYCAKHYYYGGSYAMDYWGQGTLVTVSSGGGGSGGGGSGGGGSGGGGSEIVMTQSPATLSLSPGERATLSCRASQDISKYLNWYQQKPGQAPRLLIYHTSRLHSGIPARFSGSGSGTDYTLTISSLQPEDFAVYFCQQGNTLPYTFGQGTKLEIKTTTPAPRPPTPAPTIASQPLSLRPEACRPAAGGAVHTRGLDFACDIYIWAPLAGTCGVLLLSLVITLYCKRGRKKLLYIFKQPFMRPVQTTQEEDGCSCRFPEEEEGGCELRVKFSRSADAPAYKQGQNQLYNELNLGRREEYDVLDKRRGRDPEMGGKPRRKNPQEGLYNELQKDKMAEAYSEIGMKGERRRGKGHDGLYQGLSTATKDTYDALHMQALPPR

SEQ ID NO: 1084 - protein, 247 aa, Artificial Sequence
  source: /note="Description of Artificial Sequence: Synthetic polypeptide"
QVQLQESGPGLVKPSETLSLTCTVSGVSLPDYGVSWIRQPPGKGLEWIGVIWGSETTYYQSSLKSRVTISKDNSKNQVSLKLSSVTAADTAVYYCAKHYYYGGSYAMDYWGQGTLVTVSSGGGGSGGGGSGGGGSGGGGSEIVMTQSPATLSLSPGERATLSCRASQDISKYLNWYQQKPGQAPRLLIYHTSRLHSGIPARFSGSGSGTDYTLTISSLQPEDFAVYFCQQGNTLPYTFGQGTKLEIK

SEQ ID NO: 1085 - protein, 491 aa, Artificial Sequence
  source: /note="Description of Artificial Sequence: Synthetic polypeptide"
MALPVTALLLPLALLLHAARPQVQLQESGPGLVKPSETLSLTCTVSGVSLPDYGVSWIRQPPGKGLEWIGVIWGSETTYYQSSLKSRVTISKDNSKNQVSLKLSSVTAADTAVYYCAKHYYYGGSYAMDYWGQGTLVTVSSGGGGSGGGGSGGGGSGGGGSEIVMTQSPATLSLSPGERATLSCRASQDISKYLNWYQQKPGQAPRLLIYHTSRLHSGIPARFSGSGSGTDYTLTISSLQPEDFAVYFCQQGNTLPYTFGQGTKLEIKTTTPAPRPPTPAPTIASQPLSLRPEACRPAAGGAVHTRGLDFACDIYIWAPLAGTCGVLLLSLVITLYCKRGRKKLLYIFKQPFMRPVQTTQEEDGCSCRFPEEEEGGCELRVKFSRSADAPAYKQGQNQLYNELNLGRREEYDVLDKRRGRDPEMGGKPRRKNPQEGLYNELQKDKMAEAYSEIGMKGERRRGKGHDGLYQGLSTATKDTYDALHMQALPPR

SEQ ID NO: 1086 - protein, 247 aa, Artificial Sequence
  source: /note="Description of Artificial Sequence: Synthetic polypeptide"
EIVMTQSPATLSLSPGERATLSCRASQDISKYLNWYQQKPGQAPRLLIYHTSRLHSGIPARFSGSGSGTDYTLTISSLQPEDFAVYFCQQGNTLPYTFGQGTKLEIKGGGGSGGGGSGGGGSGGGGSQVQLQESGPGLVKPSETLSLTCTVSGVSLPDYGVSWIRQPPGKGLEWIGVIWGSETTYYNSSLKSRVTISKDNSKNQVSLKLSSVTAADTAVYYCAKHYYYGGSYAMDYWGQGTLVTVSS

SEQ ID NO: 1087 - protein, 491 aa, Artificial Sequence
  source: /note="Description of Artificial Sequence: Synthetic polypeptide"
MALPVTALLLPLALLLHAARPEIVMTQSPATLSLSPGERATLSCRASQDISKYLNWYQQKPGQAPRLLIYHTSRLHSGIPARFSGSGSGTDYTLTISSLQPEDFAVYFCQQGNTLPYTFGQGTKLEIKGGGGSGGGGSGGGGSGGGGSQVQLQESGPGLVKPSETLSLTCTVSGVSLPDYGVSWIRQPPGKGLEWIGVIWGSETTYYNSSLKSRVTISKDNSKNQVSLKLSSVTAADTAVYYCAKHYYYGGSYAMDYWGQGTLVTVSSTTTPAPRPPTPAPTIASQPLSLRPEACRPAAGGAVHTRGLDFACDIYIWAPLAGTCGVLLLSLVITLYCKRGRKKLLYIFKQPFMRPVQTTQEEDGCSCRFPEEEEGGCELRVKFSRSADAPAYKQGQNQLYNELNLGRREEYDVLDKRRGRDPEMGGKPRRKNPQEGLYNELQKDKMAEAYSEIGMKGERRRGKGHDGLYQGLSTATKDTYDALHMQALPPR

SEQ ID NO: 1088 - protein, 247 aa, Artificial Sequence
  source: /note="Description of Artificial Sequence: Synthetic polypeptide"
QVQLQESGPGLVKPSETLSLTCTVSGVSLPDYGVSWIRQPPGKGLEWIGVIWGSETTYYNSSLKSRVTISKDNSKNQVSLKLSSVTAADTAVYYCAKHYYYGGSYAMDYWGQGTLVTVSSGGGGSGGGGSGGGGSGGGGSEIVMTQSPATLSLSPGERATLSCRASQDISKYLNWYQQKPGQAPRLLIYHTSRLHSGIPARFSGSGSGTDYTLTISSLQPEDFAVYFCQQGNTLPYTFGQGTKLEIK

SEQ ID NO: 1089 - protein, 491 aa, Artificial Sequence; identical to SEQ ID NO: 1087
  source: /note="Description of Artificial Sequence: Synthetic polypeptide"

SEQ ID NO: 1090 - protein, 242 aa, Artificial Sequence
  source: /note="Description of Artificial Sequence: Synthetic polypeptide"
EIVMTQSPATLSLSPGERATLSCRASQDISKYLNWYQQKPGQAPRLLIYHTSRLHSGIPARFSGSGSGTDYTLTISSLQPEDFAVYFCQQGNTLPYTFGQGTKLEIKGGGGSGGGGSGGGGSQVQLQESGPGLVKPSETLSLTCTVSGVSLPDYGVSWIRQPPGKGLEWIGVIWGSETTYYNSSLKSRVTISKDNSKNQVSLKLSSVTAADTAVYYCAKHYYYGGSYAMDYWGQGTLVTVSS

SEQ ID NO: 1091 - protein, 491 aa, Artificial Sequence
  source: /note="Description of Artificial Sequence: Synthetic polypeptide"
MALPVTALLLPLALLLHAARPQVQLQESGPGLVKPSETLSLTCTVSGVSLPDYGVSWIRQPPGKGLEWIGVIWGSETTYYNSSLKSRVTISKDNSKNQVSLKLSSVTAADTAVYYCAKHYYYGGSYAMDYWGQGTLVTVSSGGGGSGGGGSGGGGSGGGGSEIVMTQSPATLSLSPGERATLSCRASQDISKYLNWYQQKPGQAPRLLIYHTSRLHSGIPARFSGSGSGTDYTLTISSLQPEDFAVYFCQQGNTLPYTFGQGTKLEIKTTTPAPRPPTPAPTIASQPLSLRPEACRPAAGGAVHTRGLDFACDIYIWAPLAGTCGVLLLSLVITLYCKRGRKKLLYIFKQPFMRPVQTTQEEDGCSCRFPEEEEGGCELRVKFSRSADAPAYKQGQNQLYNELNLGRREEYDVLDKRRGRDPEMGGKPRRKNPQEGLYNELQKDKMAEAYSEIGMKGERRRGKGHDGLYQGLSTATKDTYDALHMQALPPR

SEQ ID NO: 1092 - protein, 242 aa, Artificial Sequence
  source: /note="Description of Artificial Sequence: Synthetic polypeptide"
QVQLQESGPGLVKPSETLSLTCTVSGVSLPDYGVSWIRQPPGKGLEWIGVIWGSETTYYNSSLKSRVTISKDNSKNQVSLKLSSVTAADTAVYYCAKHYYYGGSYAMDYWGQGTLVTVSSGGGGSGGGGSGGGGSEIVMTQSPATLSLSPGERATLSCRASQDISKYLNWYQQKPGQAPRLLIYHTSRLHSGIPARFSGSGSGTDYTLTISSLQPEDFAVYFCQQGNTLPYTFGQGTKLEIK

SEQ ID NO: 1093 - protein, 486 aa, Artificial Sequence
  source: /note="Description of Artificial Sequence: Synthetic polypeptide"
MALPVTALLLPLALLLHAARPEIVMTQSPATLSLSPGERATLSCRASQDISKYLNWYQQKPGQAPRLLIYHTSRLHSGIPARFSGSGSGTDYTLTISSLQPEDFAVYFCQQGNTLPYTFGQGTKLEIKGGGGSGGGGSGGGGSQVQLQESGPGLVKPSETLSLTCTVSGVSLPDYGVSWIRQPPGKGLEWIGVIWGSETTYYNSSLKSRVTISKDNSKNQVSLKLSSVTAADTAVYYCAKHYYYGGSYAMDYWGQGTLVTVSSTTTPAPRPPTPAPTIASQPLSLRPEACRPAAGGAVHTRGLDFACDIYIWAPLAGTCGVLLLSLVITLYCKRGRKKLLYIFKQPFMRPVQTTQEEDGCSCRFPEEEEGGCELRVKFSRSADAPAYKQGQNQLYNELNLGRREEYDVLDKRRGRDPEMGGKPRRKNPQEGLYNELQKDKMAEAYSEIGMKGERRRGKGHDGLYQGLSTATKDTYDALHMQALPPR

SEQ ID NO: 1094 - protein, 5 aa, Artificial Sequence
  source: /note="Description of Artificial Sequence: Synthetic peptide"
DYGVS

SEQ ID NO: 1095 - protein, 16 aa, Artificial Sequence
  source: /note="Description of Artificial Sequence: Synthetic peptide"
VIWGSETTYYNSALKS

SEQ ID NO: 1096 - protein, 12 aa, Artificial Sequence
  source: /note="Description of Artificial Sequence: Synthetic peptide"
HYYYGGSYAMDY

SEQ ID NO: 1097 - protein, 11 aa, Artificial Sequence
  source: /note="Description of Artificial Sequence: Synthetic peptide"
RASQDISKYLN

SEQ ID NO: 1098 - protein, 7 aa, Artificial Sequence
  source: /note="Description of Artificial Sequence: Synthetic peptide"
HTSRLHS

SEQ ID NO: 1099 - protein, 9 aa, Artificial Sequence
  source: /note="Description of Artificial Sequence: Synthetic peptide"
QQGNTLPYT

SEQ ID NO: 1100 - protein, 5 aa, Artificial Sequence
  source: /note="Description of Artificial Sequence: Synthetic peptide"
DYGVS

SEQ ID NO: 1101 - protein, 16 aa, Artificial Sequence
  source: /note="Description of Artificial Sequence: Synthetic peptide"
VIWGSETTYYSSSLKS

SEQ ID NO: 1102 - protein, 12 aa, Artificial Sequence
  source: /note="Description of Artificial Sequence: Synthetic peptide"
HYYYGGSYAMDY

SEQ ID NO: 1103 - protein, 11 aa, Artificial Sequence
  source: /note="Description of Artificial Sequence: Synthetic peptide"
RASQDISKYLN

SEQ ID NO: 1104 - protein, 7 aa, Artificial Sequence
  source: /note="Description of Artificial Sequence: Synthetic peptide"
HTSRLHS

SEQ ID NO: 1105 - protein, 9 aa, Artificial Sequence
  source: /note="Description of Artificial Sequence: Synthetic peptide"
QQGNTLPYT

SEQ ID NO: 1106 - protein, 5 aa, Artificial Sequence
  source: /note="Description of Artificial Sequence: Synthetic peptide"
DYGVS

SEQ ID NO: 1107 - protein, 16 aa, Artificial Sequence
  source: /note="Description of Artificial Sequence: Synthetic peptide"
VIWGSETTYYQSSLKS

SEQ ID NO: 1108 - protein, 12 aa, Artificial Sequence
  source: /note="Description of Artificial Sequence: Synthetic peptide"
HYYYGGSYAMDY

SEQ ID NO: 1109 - protein, 11 aa, Artificial Sequence
  source: /note="Description of Artificial Sequence: Synthetic peptide"
RASQDISKYLN

SEQ ID NO: 1110 - protein, 7 aa, Artificial Sequence
  source: /note="Description of Artificial Sequence: Synthetic peptide"
HTSRLHS

SEQ ID NO: 1111 - protein, 9 aa, Artificial Sequence
  source: /note="Description of Artificial Sequence: Synthetic peptide"
QQGNTLPYT

SEQ ID NO: 1112 - protein, 5 aa, Artificial Sequence
  source: /note="Description of Artificial Sequence: Synthetic peptide"
DYGVS

SEQ ID NO: 1113 - protein, 16 aa, Artificial Sequence
  source: /note="Description of Artificial Sequence: Synthetic peptide"
VIWGSETTYYNSSLKS

SEQ ID NO: 1114 - protein, 12 aa, Artificial Sequence
  source: /note="Description of Artificial Sequence: Synthetic peptide"
HYYYGGSYAMDY

SEQ ID NO: 1115 - protein, 11 aa, Artificial Sequence
  source: /note="Description of Artificial Sequence: Synthetic peptide"
RASQDISKYLN

SEQ ID NO: 1116 - protein, 7 aa, Artificial Sequence
  source: /note="Description of Artificial Sequence: Synthetic peptide"
HTSRLHS

SEQ ID NO: 1117 - protein, 9 aa, Artificial Sequence
  source: /note="Description of Artificial Sequence: Synthetic peptide"
QQGNTLPYT

SEQ ID NO: 1118 - protein, 5 aa, Artificial Sequence
  source: /note="Description of Artificial Sequence: Synthetic peptide"
NHGMS

SEQ ID NO: 1119 - protein, 5 aa, Artificial Sequence
  source: /note="Description of Artificial Sequence: Synthetic peptide"
NYAMS

SEQ ID NO: 1120 - protein, 5 aa, Artificial Sequence
  source: /note="Description of Artificial Sequence: Synthetic peptide"
DYAMH

SEQ ID NO: 1121 - protein, 5 aa, Artificial Sequence
  source: /note="Description of Artificial Sequence: Synthetic peptide"
NHGMS

SEQ ID NO: 1122 - protein, 5 aa, Artificial Sequence
  source: /note="Description of Artificial Sequence: Synthetic peptide"
NFGIN

SEQ ID NO: 1123 - protein, 5 aa, Artificial Sequence
  source: /note="Description of Artificial Sequence: Synthetic peptide"
SDAMT

SEQ ID NO: 1124 - protein, 5 aa, Artificial Sequence
  source: /note="Description of Artificial Sequence: Synthetic peptide"
NYGIT

SEQ ID NO: 1125 - protein, 5 aa, Artificial Sequence
  source: /note="Description of Artificial Sequence: Synthetic peptide"
NHGMS

SEQ ID NO: 1126 - protein, 5 aa, Artificial Sequence
  source: /note="Description of Artificial Sequence: Synthetic peptide"
NHGMS

SEQ ID NO: 1127 - protein, 5 aa, Artificial Sequence
  source: /note="Description of Artificial Sequence: Synthetic peptide"
NHGMS

SEQ ID NO: 1128 - protein, 5 aa, Artificial Sequence
  source: /note="Description of Artificial Sequence: Synthetic peptide"
DYYMS

SEQ ID NO: 1129 - protein, 5 aa, Artificial Sequence
  source: /note="Description of Artificial Sequence: Synthetic peptide"
DYYMS

SEQ ID NO: 1130 - protein, 5 aa, Artificial Sequence
  source: /note="Description of Artificial Sequence: Synthetic peptide"
NHGMS

SEQ ID NO: 1131 - protein, 5 aa, Artificial Sequence
  source: /note="Description of Artificial Sequence: Synthetic peptide"
NHGMS

SEQ ID NO: 1132 - protein, 5 aa, Artificial Sequence
  source: /note="Description of Artificial Sequence: Synthetic peptide"
NHGMS

SEQ ID NO: 1133 - protein, 7 aa, Artificial Sequence
  source: /note="Description of Artificial Sequence: Synthetic peptide"
SSYYYWG

SEQ ID NO: 1134 - protein, 7 aa, Artificial Sequence
  source: /note="Description of Artificial Sequence: Synthetic peptide"
TSGMCVS

SEQ ID NO: 1135 - protein, 5 aa, Artificial Sequence
  source: /note="Description of Artificial Sequence: Synthetic peptide"
SYSMN

SEQ ID NO: 1136 - protein, 5 aa, Artificial Sequence
  source: /note="Description of Artificial Sequence: Synthetic peptide"
DYYMS

SEQ ID NO: 1137 - protein, 5 aa, Artificial Sequence
  source: /note="Description of Artificial Sequence: Synthetic peptide"
SHYIH

SEQ ID NO: 1138 - protein, 7 aa, Artificial Sequence
  source: /note="Description of Artificial Sequence: Synthetic peptide"
SGGYYWS

SEQ ID NO: 1139 - protein, 5 aa, Artificial Sequence
  source: /note="Description of Artificial Sequence: Synthetic peptide"
SYAIS

SEQ ID NO: 1140 - protein, 7 aa, Artificial Sequence
  source: /note="Description of Artificial Sequence: Synthetic peptide"
SNSAAWN

SEQ ID NO: 1141 - protein, 5 aa, Artificial Sequence
  source: /note="Description of Artificial Sequence: Synthetic peptide"
SYAMS

SEQ ID NO: 1142 - protein, 5 aa, Artificial Sequence
  source: /note="Description of Artificial Sequence: Synthetic peptide"
RYPMS

SEQ ID NO: 1143 - protein, 5 aa, Artificial Sequence
  source: /note="Description of Artificial Sequence: Synthetic peptide"
SYAMS

SEQ ID NO: 1144 - protein, 5 aa, Artificial Sequence
  source: /note="Description of Artificial Sequence: Synthetic peptide"
SYAMS

SEQ ID NO: 1145 - protein, 5 aa, Artificial Sequence
  source: /note="Description of Artificial Sequence: Synthetic peptide"
DYAMH

SEQ ID NO: 1146 - protein, 5 aa, Artificial Sequence
  source: /note="Description of Artificial Sequence: Synthetic peptide"
DYAMH

SEQ ID NO: 1147 - protein, 5 aa, Artificial Sequence
  source: /note="Description of Artificial Sequence: Synthetic peptide"
SYAMS

SEQ ID NO: 1148 - protein, 5 aa, Artificial Sequence
  source: /note="Description of Artificial Sequence: Synthetic peptide"
SYAMS

SEQ ID NO: 1149 - protein, 5 aa, Artificial Sequence
  source: /note="Description of Artificial Sequence: Synthetic peptide"
SYAMS

SEQ ID NO: 1150 - protein, 5 aa, Artificial Sequence
  source: /note="Description of Artificial Sequence: Synthetic peptide"
SYAMS

SEQ ID NO: 1151 - protein, 5 aa, Artificial Sequence
  source: /note="Description of Artificial Sequence: Synthetic peptide"
SYAMS

SEQ ID NO: 1152 - protein, 5 aa, Artificial Sequence
  source: /note="Description of Artificial Sequence: Synthetic peptide"
SYAMS

SEQ ID NO: 1153 - protein, 5 aa, Artificial Sequence
  source: /note="Description of Artificial Sequence: Synthetic peptide"
SYAMS

SEQ ID NO: 1154 - protein, 5 aa, Artificial Sequence
  source: /note="Description of Artificial Sequence: Synthetic peptide"
NFGMN

SEQ ID NO: 1155 - protein, 5 aa, Artificial Sequence
  source: /note="Description of Artificial Sequence: Synthetic peptide"
DYSIN

SEQ ID NO: 1156 - protein, 5 aa, Artificial Sequence
  source: /note="Description of Artificial Sequence: Synthetic peptide"
HYSMN

SEQ ID NO: 1157 - protein, 5 aa, Artificial Sequence
  source: /note="Description of Artificial Sequence: Synthetic peptide"
HYSMN

SEQ ID NO: 1158 - protein, 16 aa, Artificial Sequence
  source: /note="Description of Artificial Sequence: Synthetic peptide"
GIVYSGSTYYAASVKG

SEQ ID NO: 1159 - protein, 17 aa, Artificial Sequence
  source: /note="Description of Artificial Sequence: Synthetic peptide"
GISRSGENTYYADSVKG

SEQ ID NO: 1160 - protein, 17 aa, Artificial Sequence
  source: /note="Description of Artificial Sequence: Synthetic peptide"
GISWNSGSIGYADSVKG

SEQ ID NO: 1161 - protein, 16 aa, Artificial Sequence
  source: /note="Description of Artificial Sequence: Synthetic peptide"
GIVYSGSTYYAASVKG

SEQ ID NO: 1162 - protein, 17 aa, Artificial Sequence
  source: /note="Description of Artificial Sequence: Synthetic peptide"
WINPKNNNTNYAQKFQG

SEQ ID NO: 1163 - protein, 17 aa, Artificial Sequence
  source: /note="Description of Artificial Sequence: Synthetic peptide"
VISGSGGTTYYADSVKG

SEQ ID NO: 1164 - protein, 17 aa, Artificial Sequence
  source: /note="Description of Artificial Sequence: Synthetic peptide"
WISAYNGNTNYAQKFQG

SEQ ID NO: 1165 - protein, 16 aa, Artificial Sequence
  source: /note="Description of Artificial Sequence: Synthetic peptide"
GIVYSGSTYYAASVKG

SEQ ID NO: 1166 - protein, 16 aa, Artificial Sequence
  source: /note="Description of Artificial Sequence: Synthetic peptide"
GIVYSGSTYYAASVKG

SEQ ID NO: 1167 - protein, 16 aa, Artificial Sequence
  source: /note="Description of Artificial Sequence: Synthetic peptide"
GIVYSGSTYYAASVKG

SEQ ID NO: 1168 - protein, 17 aa, Artificial Sequence
  source: /note="Description of Artificial Sequence: Synthetic peptide"
YISSSGSTIYYADSVKG

SEQ ID NO: 1169 - protein, 17 aa, Artificial Sequence
  source: /note="Description of Artificial Sequence: Synthetic peptide"
YISSSGNTIYYADSVKG

SEQ ID NO: 1170 - protein, 16 aa, Artificial Sequence
  source: /note="Description of Artificial Sequence: Synthetic peptide"
GIVYSGSTYYAASVKG

SEQ ID NO: 1171 - protein, 16 aa, Artificial Sequence
  source: /note="Description of Artificial Sequence: Synthetic peptide"
GIVYSGSTYYAASVKG

SEQ ID NO: 1172 - protein, 16 aa, Artificial Sequence
  source: /note="Description of Artificial Sequence: Synthetic peptide"
GIVYSGSTYYAASVKG

SEQ ID NO: 1173 - protein, 16 aa, Artificial Sequence
  source: /note="Description of Artificial Sequence: Synthetic peptide"
SIYYSGSAYYNPSLKS

SEQ ID NO: 1174 - protein, 16 aa, Artificial Sequence
  source: /note="Description of Artificial Sequence: Synthetic peptide"
RIDWDEDKFYSTSLKT

SEQ ID NO: 1175 - protein, 17 aa, Artificial Sequence
  source: /note="Description of Artificial Sequence: Synthetic peptide"
SISSSSSYIYYADSVKG

SEQ ID NO: 1176 - protein, 17 aa, Artificial Sequence
  source: /note="Description of Artificial Sequence: Synthetic peptide"
YISSSGSTIYYADSVKG

SEQ ID NO: 1177 - protein, 17 aa, Artificial Sequence
  source: /note="Description of Artificial Sequence: Synthetic peptide"
MINPSGGVTAYSQTLQG

SEQ ID NO: 1178 - protein, 16 aa, Artificial Sequence
  source: /note="Description of Artificial Sequence: Synthetic peptide"
YIYYSGSTYYNPSLKS

SEQ ID NO: 1179 - protein, 17 aa, Artificial Sequence
  source: /note="Description of Artificial Sequence: Synthetic peptide"
GIIPIFGTANYAQKFQG

SEQ ID NO: 1180 - protein, 18 aa, Artificial Sequence
  source: /note="Description of Artificial Sequence: Synthetic peptide"
RTYYRSKWYSFYAISLKS

SEQ ID NO: 1181 - protein, 17 aa, Artificial Sequence
  source: /note="Description of Artificial Sequence: Synthetic peptide"
AISGSGGSTYYADSVKG

SEQ ID NO: 1182 - protein, 17 aa, Artificial Sequence
  source: /note="Description of Artificial Sequence: Synthetic peptide"
GISDSGVSTYYADSAKG

SEQ ID NO: 1183 - protein, 17 aa, Artificial Sequence
  source: /note="Description of Artificial Sequence: Synthetic peptide"
AISGSGGSTYYADSVKG

SEQ ID NO: 1184 - protein, 17 aa, Artificial Sequence
  source: /note="Description of Artificial Sequence: Synthetic peptide"
AISGSGGSTYYADSVKG

SEQ ID NO: 1185 - protein, 17 aa, Artificial Sequence
  source: /note="Description of Artificial Sequence: Synthetic peptide"
GISWNSGSIGYADSVKG

SEQ ID NO: 1186 - protein, 17 aa, Artificial Sequence
  source: /note="Description of Artificial Sequence: Synthetic peptide"
SINWKGNSLAYGDSVKG

SEQ ID NO: 1187 - protein, 17 aa, Artificial Sequence
  source: /note="Description of Artificial Sequence: Synthetic peptide"
AISGSGGSTYYADSVKG

SEQ ID NO: 1188 - protein, 17 aa, Artificial Sequence
  source: /note="Description of Artificial Sequence: Synthetic peptide"
AISGSGGSTYYADSVKG

SEQ ID NO: 1189 - protein, 17 aa, Artificial Sequence
  source: /note="Description of Artificial Sequence: Synthetic peptide"
AISGSGGSTYYADSVKG

SEQ ID NO: 1190 - protein, 17 aa, Artificial Sequence
  source: /note="Description of Artificial Sequence: Synthetic peptide"
AISGSGGSTYYADSVKG

SEQ ID NO: 1191 - protein, 17 aa, Artificial Sequence
  source: /note="Description of Artificial Sequence: Synthetic peptide"
AISGSGGSTYYADSVKG

SEQ ID NO: 1192 - protein, 17 aa, Artificial Sequence
  source: /note="Description of Artificial Sequence: Synthetic peptide"
AISGSGGSTYYADSVKG

SEQ ID NO: 1193 - protein, 17 aa, Artificial Sequence
  source: /note="Description of Artificial Sequence: Synthetic peptide"
AISGSGGSTYYADSVKG

SEQ ID NO: 1194 - protein, 17 aa, Artificial Sequence
  source: /note="Description of Artificial Sequence: Synthetic peptide"
WINTYTGESYFADDFKG

SEQ ID NO: 1195 - protein, 17 aa, Artificial Sequence
  source: /note="Description of Artificial Sequence: Synthetic peptide"
WINTETREPAYAYDFRG

SEQ ID NO: 1196 - protein, 17 aa, Artificial Sequence
  source: /note="Description of Artificial Sequence: Synthetic peptide"
RINTESGVPIYADDFKG

SEQ ID NO: 1197 - protein, 17 aa, Artificial Sequence
  source: /note="Description of Artificial Sequence: Synthetic peptide"
RINTETGEPLYADDFKG

SEQ ID NO: 1198 - protein, 7 aa, Artificial Sequence
  source: /note="Description of Artificial Sequence: Synthetic peptide"
HGGESDV

SEQ ID NO: 1199 - protein, 11 aa, Artificial Sequence
  source: /note="Description of Artificial Sequence: Synthetic peptide"
SPAHYYGGMDV

SEQ ID NO: 1200 - protein, 6 aa, Artificial Sequence
  source: /note="Description of Artificial Sequence: Synthetic peptide"
HSFLAY

SEQ ID NO: 1201 - protein, 7 aa, Artificial Sequence
  source: /note="Description of Artificial Sequence: Synthetic peptide"
HGGESDV

SEQ ID NO: 1202 - protein, 11 aa, Artificial Sequence
  source: /note="Description of Artificial Sequence: Synthetic peptide"
GPYYYQSYMDV

SEQ ID NO: 1203 - protein, 14 aa, Artificial Sequence
  source: /note="Description of Artificial Sequence: Synthetic peptide"
LDSSGYYYARGPRY

SEQ ID NO: 1204 - protein, 9 aa, Artificial Sequence
  source: /note="Description of Artificial Sequence: Synthetic peptide"
GPYYYYMDV

SEQ ID NO: 1205 - protein, 7 aa, Artificial Sequence
  source: /note="Description of Artificial Sequence: Synthetic peptide"
HGGESDV

SEQ ID NO: 1206 - protein, 7 aa, Artificial Sequence
  source: /note="Description of Artificial Sequence: Synthetic peptide"
HGGESDV

SEQ ID NO: 1207 - protein, 7 aa, Artificial Sequence
  source: /note="Description of Artificial Sequence: Synthetic peptide"
HGGESDV

SEQ ID NO: 1208 - protein, 8 aa, Artificial Sequence
  source: /note="Description of Artificial Sequence: Synthetic peptide"
ESGDGMDV

SEQ ID NO: 1209 - protein, 8 aa, Artificial Sequence
  source: /note="Description of Artificial Sequence: Synthetic peptide"
STMVREDY

SEQ ID NO: 1210 - protein, 7 aa, Artificial Sequence
  source: /note="Description of Artificial Sequence: Synthetic peptide"
HGGESDV

SEQ ID NO: 1211 - protein, 7 aa, Artificial Sequence
  source: /note="Description of Artificial Sequence: Synthetic peptide"
HGGESDV

SEQ ID NO: 1212 - protein, 7 aa, Artificial Sequence
  source: /note="Description of Artificial Sequence: Synthetic peptide"
HGGESDV

SEQ ID NO: 1213 - protein, 11 aa, Artificial Sequence
  source: /note="Description of Artificial Sequence: Synthetic peptide"
HWQEWPDAFDI

SEQ ID NO: 1214 - protein, 13 aa, Artificial Sequence
  source: /note="Description of Artificial Sequence: Synthetic peptide"
SGAGGTSATAFDI

SEQ ID NO: 1215 - protein, 10 aa, Artificial Sequence
  source: /note="Description of Artificial Sequence: Synthetic peptide"
TIAAVYAFDI

SEQ ID NO: 1216 - protein, 8 aa, Artificial Sequence
  source: /note="Description of Artificial Sequence: Synthetic peptide"
DLRGAFDI

SEQ ID NO: 1217 - protein, 11 aa, Artificial Sequence
  source: /note="Description of Artificial Sequence: Synthetic peptide"
EGSGSGWYFDF

SEQ ID NO: 1218 - protein, 13 aa, Artificial Sequence
  source: /note="Description of Artificial Sequence: Synthetic peptide"
AGIAARLRGAFDI

SEQ ID NO: 1219 - protein, 20 aa, Artificial Sequence
  source: /note="Description of Artificial Sequence: Synthetic peptide"
RGGYQLLRWDVGLLRSAFDI

SEQ ID NO: 1220 - protein, 13 aa, Artificial Sequence
  source: /note="Description of Artificial Sequence: Synthetic peptide"
SSPEGLFLYWFDP

SEQ ID NO: 1221 - protein, 9 aa, Artificial Sequence
  source: /note="Description of Artificial Sequence: Synthetic peptide"
VEGSGSLDY

SEQ ID NO: 1222 - protein, 9 aa, Artificial Sequence
  source: /note="Description of Artificial Sequence: Synthetic peptide"
RAGSEASDI

SEQ ID NO: 1223 - protein, 15 aa, Artificial Sequence
  source: /note="Description of Artificial Sequence: Synthetic peptide"
ATYKRELRYYYGMDV

SEQ ID NO: 1224 - protein, 15 aa, Artificial Sequence
  source: /note="Description of Artificial Sequence: Synthetic peptide"
ATYKRELRYYYGMDV

SEQ ID NO: 1225 - protein, 8 aa, Artificial Sequence
  source: /note="Description of Artificial Sequence: Synthetic peptide"
VGKAVPDV

SEQ ID NO: 1226 - protein, 13 aa, Artificial Sequence
  source: /note="Description of Artificial Sequence: Synthetic peptide"
HQGVAYYNYAMDV

SEQ ID NO: 1227 - protein, 8 aa, Artificial Sequence
  source: /note="Description of Artificial Sequence: Synthetic peptide"
VVRDGMDV

SEQ ID NO: 1228 - protein, 9 aa, Artificial Sequence
  source: /note="Description of Artificial Sequence: Synthetic peptide"
IPQTGTFDY

SEQ ID NO: 1229 - protein, 15 aa, Artificial Sequence
  source: /note="Description of Artificial Sequence: Synthetic peptide"
ANYKRELRYYYGMDV

SEQ ID NO: 1230 - protein, 11 aa, Artificial Sequence
  source: /note="Description of Artificial Sequence: Synthetic peptide"
ALVGATGAFDI

SEQ ID NO: 1231 - protein, 8 aa, Artificial Sequence
  source: /note="Description of Artificial Sequence: Synthetic peptide"
WFGEGFDP

SEQ ID NO: 1232 - protein, 17 aa, Artificial Sequence
  source: /note="Description of Artificial Sequence: Synthetic peptide"
VGYDSSGYYRDYYGMDV

SEQ ID NO: 1233 - protein, 13 aa, Artificial Sequence
  source: /note="Description of Artificial Sequence: Synthetic peptide"
MGWSSGYLGAFDI

SEQ ID NO: 1234 - protein, 13 aa, Artificial Sequence
  source: /note="Description of Artificial Sequence: Synthetic peptide"
GEIYYGYDGGFAY

SEQ ID NO: 1235 - protein, 8 aa, Artificial Sequence
  source: /note="Description of Artificial Sequence: Synthetic peptide"
DYSYAMDY

SEQ ID NO: 1236 - protein, 8 aa, Artificial Sequence
  source: /note="Description of Artificial Sequence: Synthetic peptide"
DYLYSLDF

SEQ ID NO: 1237 - protein, 8 aa, Artificial Sequence
  source: /note="Description of Artificial Sequence: Synthetic peptide"
DYLYSCDY

SEQ ID NO: 1238 - protein, 11 aa, Artificial Sequence
  source: /note="Description of Artificial Sequence: Synthetic peptide"
RASQSISSYLN

SEQ ID NO: 1239 - protein, 12 aa, Artificial Sequence
  source: /note="Description of Artificial Sequence: Synthetic peptide"
RASQSISSSFLA

SEQ ID NO: 1240 - protein, 16 aa, Artificial Sequence
  source: /note="Description of Artificial Sequence: Synthetic peptide"
RSSQSLLHSNGYNYLD

SEQ ID NO: 1241 - protein, 16 aa, Artificial Sequence
  source: /note="Description of Artificial Sequence: Synthetic peptide"
KSSQSLLRNDGKTPLY

SEQ ID NO: 1242 - protein, 16 aa, Artificial Sequence
  source: /note="Description of Artificial Sequence: Synthetic peptide"
RSSQSLLHSNGYNYLN

SEQ ID NO: 1243 - protein, 11 aa, Artificial Sequence
  source: /note="Description of Artificial Sequence: Synthetic peptide"
RASQSISSYLN

SEQ ID NO: 1244 - protein, 16 aa, Artificial Sequence
  source: /note="Description of Artificial Sequence: Synthetic peptide"
RSSQSLLYSNGYNYVD

SEQ ID NO: 1245 - protein, 11 aa, Artificial Sequence
  source: /note="Description of Artificial Sequence: Synthetic peptide"
RASQSVSSNLA

SEQ ID NO: 1246 - protein, 11 aa, Artificial Sequence
  source: /note="Description of Artificial Sequence: Synthetic peptide"
RASQSVSSKLA

SEQ ID NO: 1247 - protein, 12 aa, Artificial Sequence
  source: /note="Description of Artificial Sequence: Synthetic peptide"
RASQSVGSTNLA

SEQ ID NO: 1248 - protein, 11 aa, Artificial Sequence
  source: /note="Description of Artificial Sequence: Synthetic peptide"
RASQSISSYLN

SEQ ID NO: 1249 - protein, 16 aa, Artificial Sequence
  source: /note="Description of Artificial Sequence: Synthetic peptide"
KSSESLVHNSGKTYLN

SEQ ID NO: 1250 - protein, 11 aa, Artificial Sequence
  source: /note="Description of Artificial Sequence: Synthetic peptide"
QASEDINKFLN

SEQ ID NO: 1251 - protein, 11 aa, Artificial Sequence
  source: /note="Description of Artificial Sequence: Synthetic peptide"
RASQSVGSNLA

SEQ ID NO: 1252 - protein, 12 aa, Artificial Sequence
  source: /note="Description of Artificial Sequence: Synthetic peptide"
RASQSIGSSSLA

SEQ ID NO: 1253 - protein, 11 aa, Artificial Sequence
  source: /note="Description of Artificial Sequence: Synthetic peptide"
KASQDIDDAMN

SEQ ID NO: 1254 - protein, 11 aa, Artificial Sequence
  source: /note="Description of Artificial Sequence: Synthetic peptide"
RASQDIYNNLA

SEQ ID NO: 1255 - protein, 16 aa, Artificial Sequence
  source: /note="Description of Artificial Sequence: Synthetic peptide"
RSSQSLLHSNGYNYLD

SEQ ID NO: 1256 - protein, 11 aa, Artificial Sequence
  source: /note="Description of Artificial Sequence: Synthetic peptide"
GGNNIGTKSVH

SEQ ID NO: 1257 - protein, 11 aa, Artificial Sequence
  source: /note="Description of Artificial Sequence: Synthetic peptide"
SGDGLSKKYVS

SEQ ID NO: 1258 - protein, 11 aa, Artificial Sequence
  source: /note="Description of Artificial Sequence: Synthetic peptide"
RASQGIRNWLA

SEQ ID NO: 1259 - protein, 11 aa, Artificial Sequence
  source: /note="Description of Artificial Sequence: Synthetic peptide"
GGNNIGSKSVH

SEQ ID NO: 1260 - protein, 11 aa, Artificial Sequence
  source: /note="Description of Artificial Sequence: Synthetic peptide"
QGDSLGNYYAT

SEQ ID NO: 1261 - protein, 12 aa, Artificial Sequence
  source: /note="Description of Artificial Sequence: Synthetic peptide"
RASQSVSSAYLA

SEQ ID NO: 1262 - protein, 11 aa, Artificial Sequence
  source: /note="Description of Artificial Sequence: Synthetic peptide"
RASQSVSNSLA

SEQ ID NO: 1263 - protein, 12 aa, Artificial Sequence
  source: /note="Description of Artificial Sequence: Synthetic peptide"
RASQSVSSSFLA

SEQ ID NO: 1264 - protein, 12 aa, Artificial Sequence
  source: /note="Description of Artificial Sequence: Synthetic peptide"
RASQSVSTTFLA

SEQ ID NO: 1265 - protein, 11 aa, Artificial Sequence
  source: /note="Description of Artificial Sequence: Synthetic peptide"
RASQSISSYLN

SEQ ID NO: 1266 - protein, 12 aa, Artificial Sequence
  source: /note="Description of Artificial Sequence: Synthetic peptide"
RATQSIGSSFLA

SEQ ID NO: 1267 - protein, 12 aa, Artificial Sequence
  source: /note="Description of Artificial Sequence: Synthetic peptide"
RASQSVSSSYLA

SEQ ID NO: 1268 - protein, 12 aa, Artificial Sequence
  source: /note="Description of Artificial Sequence: Synthetic peptide"
RASQSVSSSYLA

SEQ ID NO: 1269 - protein, 12 aa, Artificial Sequence
  source: /note="Description of Artificial Sequence: Synthetic peptide"
RASQRVASNYLA

SEQ ID NO: 1270 - protein, 12 aa, Artificial Sequence
  source: /note="Description of Artificial Sequence: Synthetic peptide"
RASQSLSSNFLA

SEQ ID NO: 1271 - protein, 16 aa, Artificial Sequence
  source: /note="Description of Artificial Sequence: Synthetic peptide"
RSSQSLLHSNGYNYLD

SEQ ID NO: 1272 - protein, 12 aa, Artificial Sequence
  source: /note="Description of Artificial Sequence: Synthetic peptide"
RASQSVSSSYLA

SEQ ID NO: 1273 - protein, 12 aa, Artificial Sequence
  source: /note="Description of Artificial Sequence: Synthetic peptide"
RASQSVASSFLA

SEQ ID NO: 1274 - protein, 11 aa, Artificial Sequence
  source: /note="Description of Artificial Sequence: Synthetic peptide"
RASQDVNTAVS

SEQ ID NO: 1275 - protein, 15 aa, Artificial Sequence
  source: /note="Description of Artificial Sequence: Synthetic peptide"
RASESVSVIGAHLIH

SEQ ID NO: 1276 - protein, 15 aa, Artificial Sequence
  source: /note="Description of Artificial Sequence: Synthetic peptide"
RASESVTILGSHLIY

SEQ ID NO: 1277 - protein, 15 aa, Artificial Sequence
  source: /note="Description of Artificial Sequence: Synthetic peptide"
RASESVTILGSHLIY

SEQ ID NO: 1278 - protein, 7 aa, Artificial Sequence
  source: /note="Description of Artificial Sequence: Synthetic peptide"
AASSLQS

SEQ ID NO: 1279 - protein, 7 aa, Artificial Sequence
  source: /note="Description of Artificial Sequence: Synthetic peptide"
GASRRAT

SEQ ID NO: 1280 - protein, 7 aa, Artificial Sequence
  source: /note="Description of Artificial Sequence: Synthetic peptide"
LGSNRAS

SEQ ID NO: 1281 - protein, 7 aa, Artificial Sequence
  source: /note="Description of Artificial Sequence: Synthetic peptide"
EVSNRFS

SEQ ID NO: 1282 - protein, 7 aa, Artificial Sequence
  source: /note="Description of Artificial Sequence: Synthetic peptide"
LGSKRAS

SEQ ID NO: 1283 - protein, 7 aa, Artificial Sequence
  source: /note="Description of Artificial Sequence: Synthetic peptide"
GASTLAS

SEQ ID NO: 1284 - protein, 7 aa, Artificial Sequence
  source: /note="Description of Artificial Sequence: Synthetic peptide"
LGSNRAS

SEQ ID NO: 1285 - protein, 7 aa, Artificial Sequence
  source: /note="Description of Artificial Sequence: Synthetic peptide"
GASTRAS

SEQ ID NO: 1286 - protein, 7 aa, Artificial Sequence
  source: /note="Description of Artificial Sequence: Synthetic peptide"
GASIRAT

SEQ ID NO: 1287 - protein, 7 aa, Artificial Sequence
  source: /note="Description of Artificial Sequence: Synthetic peptide"
DASNRAT

SEQ ID NO: 1288 - protein, 7 aa, Artificial Sequence
  source: /note="Description of Artificial Sequence: Synthetic peptide"
AASSLQS

SEQ ID NO: 1289 - protein, 7 aa, Artificial Sequence
  source: /note="Description of Artificial Sequence: Synthetic peptide"
EVSNRDS

SEQ ID NO: 1290 - protein, 7 aa, Artificial Sequence
  source: /note="Description of Artificial Sequence: Synthetic peptide"
DASTLQT

SEQ ID NO: 1291 - protein, 7 aa, Artificial Sequence
  source: /note="Description of Artificial Sequence: Synthetic peptide"
GASTRAT

SEQ ID NO: 1292 - protein, 7 aa, Artificial Sequence
  source: /note="Description of Artificial Sequence: Synthetic peptide"
GASSRAS

SEQ ID NO: 1293 - protein, 7 aa, Artificial Sequence
  source: /note="Description of Artificial Sequence: Synthetic peptide"
SATSPVP

SEQ ID NO: 1294 - protein, 7 aa, Artificial Sequence
  source: /note="Description of Artificial Sequence: Synthetic peptide"
AANKSQS

SEQ ID NO: 1295 - protein, 7 aa, Artificial Sequence
  source: /note="Description of Artificial Sequence: Synthetic peptide"
LGSNRAS

SEQ ID NO: 1296 - protein, 7 aa, Artificial Sequence
  source: /note="Description of Artificial Sequence: Synthetic peptide"
DDSVRPS

SEQ ID NO: 1297 - protein, 7 aa, Artificial Sequence
  source: /note="Description of Artificial Sequence: Synthetic peptide"
RDKERPS

SEQ ID NO: 1298 - protein, 7 aa, Artificial Sequence
  source: /note="Description of Artificial Sequence: Synthetic peptide"
AASNLQS

SEQ ID NO: 1299 - protein, 7 aa, Artificial Sequence
  source: /note="Description of Artificial Sequence: Synthetic peptide"
GKNNRPS

SEQ ID NO: 1300 - protein, 7 aa, Artificial Sequence
  source: /note="Description of Artificial Sequence: Synthetic peptide"
GTNNRPS

SEQ ID NO: 1301 - protein, 7 aa, Artificial Sequence
  source: /note="Description of Artificial Sequence: Synthetic peptide"
GASTRAT

SEQ ID NO: 1302 - protein, 7 aa, Artificial Sequence
  source: /note="Description of Artificial Sequence: Synthetic peptide"
DASSRAT

SEQ ID NO: 1303 - protein, 7 aa, Artificial Sequence
  source: /note="Description of Artificial Sequence: Synthetic peptide"
GASSRAT

SEQ ID NO: 1304 - protein, 7 aa, Artificial Sequence
  source: /note="Description of Artificial Sequence: Synthetic peptide"
GSSNRAT

SEQ ID NO: 1305 - protein, 7 aa, Artificial Sequence
  source: /note="Description of Artificial Sequence: Synthetic peptide"
AASSLQS

SEQ ID NO: 1306 - protein, 7 aa, Artificial Sequence
  source: /note="Description of Artificial Sequence: Synthetic peptide"
GASQRAT

SEQ ID NO: 1307 - protein, 7 aa, Artificial Sequence
  source: /note="Description of Artificial Sequence: Synthetic peptide"
GASSRAT

SEQ ID NO: 1308 - protein, 7 aa, Artificial Sequence
  source: /note="Description of Artificial Sequence: Synthetic peptide"
GASSRAT

SEQ ID NO: 1309 - protein, 7 aa, Artificial Sequence
  source: /note="Description of Artificial Sequence: Synthetic peptide"
GASSRAT

SEQ ID NO: 1310 - protein, 7 aa, Artificial Sequence
  source: /note="Description of Artificial Sequence: Synthetic peptide"
GASNWAT

SEQ ID NO: 1311 - protein, 7 aa, Artificial Sequence
  source: /note="Description of Artificial Sequence: Synthetic peptide"
LGSNRAS

SEQ ID NO: 1312 - protein, 7 aa, Artificial Sequence
  source: /note="Description of Artificial Sequence: Synthetic peptide"
GTSSRAT

SEQ ID NO: 1313 - protein, 7 aa, Artificial Sequence
  source: /note="Description of Artificial Sequence: Synthetic peptide"
GASGRAT

SEQ ID NO: 1314 - protein, 7 aa, Artificial Sequence
  source: /note="Description of Artificial Sequence: Synthetic peptide"
SASYRYT

SEQ ID NO: 1315 - protein, 7 aa, Artificial Sequence
  source: /note="Description of Artificial Sequence: Synthetic peptide"
LASNLET

SEQ ID NO: 1316 - protein, 7 aa, Artificial Sequence
  source: /note="Description of Artificial Sequence: Synthetic peptide"
LASNVQT

SEQ ID NO: 1317 - protein, 7 aa, Artificial Sequence
  source: /note="Description of Artificial Sequence: Synthetic peptide"
LASNVQT

SEQ ID NO: 1318 - protein, 9 aa, Artificial Sequence
  source: /note="Description of Artificial Sequence: Synthetic peptide"
QQSYSTPYT

SEQ ID NO: 1319 - protein, 10 aa, Artificial Sequence
  source: /note="Description of Artificial Sequence: Synthetic peptide"
QQYHSSPSWT

SEQ ID NO: 1320 - protein, 9 aa, Artificial Sequence
  source: /note="Description of Artificial Sequence: Synthetic peptide"
MQALQTPYT

SEQ ID NO: 1321 - protein, 8 aa, Artificial Sequence
  source: /note="Description of Artificial Sequence: Synthetic peptide"
MQNIQFPS

SEQ ID NO: 1322 - protein, 9 aa, Artificial Sequence
  source: /note="Description of Artificial Sequence: Synthetic peptide"
MQALQTPYT

SEQ ID NO: 1323 - protein, 8 aa, Artificial Sequence
  source: /note="Description of Artificial Sequence: Synthetic peptide"
QQSYKRAS

SEQ ID NO: 1324 - protein, 9 aa, Artificial Sequence
  source: /note="Description of Artificial Sequence: Synthetic peptide"
MQGRQFPYS

SEQ ID NO: 1325 - protein, 8 aa, Artificial Sequence
  source: /note="Description of Artificial Sequence: Synthetic peptide"
QQYGSSLT

SEQ ID NO: 1326 - protein, 9 aa, Artificial Sequence
  source: /note="Description of Artificial Sequence: Synthetic peptide"
QQYGSSSWT

SEQ ID NO: 1327 - protein, 10 aa, Artificial Sequence
  source: /note="Description of Artificial Sequence: Synthetic peptide"
QQYGSSPPWT

SEQ ID NO: 1328 - protein, 7 aa, Artificial Sequence
  source: /note="Description of Artificial Sequence: Synthetic peptide"
QQSYTLA

SEQ ID NO: 1329 - protein, 9 aa, Artificial Sequence
  source: /note="Description of Artificial Sequence: Synthetic peptide"
MQGTHWPGT

SEQ ID NO: 1330 - protein, 9 aa, Artificial Sequence
  source: /note="Description of Artificial Sequence: Synthetic peptide"
QQYESLPLT

SEQ ID NO: 1331 - protein, 10 aa, Artificial Sequence
  source: /note="Description of Artificial Sequence: Synthetic peptide"
QQYNDWLPVT

SEQ ID NO: 1332 - protein, 10 aa, Artificial Sequence
  source: /note="Description of Artificial Sequence: Synthetic peptide"
QQYAGSPPFT

SEQ ID NO: 1333 - protein, 9 aa, Artificial Sequence
  source: /note="Description of Artificial Sequence: Synthetic peptide"
LQHDNFPLT

SEQ ID NO: 1334 - protein, 9 aa, Artificial Sequence
  source: /note="Description of Artificial Sequence: Synthetic peptide"
QHYYRFPYS

SEQ ID NO: 1335 - protein, 9 aa, Artificial Sequence
  source: /note="Description of Artificial Sequence: Synthetic peptide"
MQALQTPYT

SEQ ID NO: 1336 - protein, 11 aa, Artificial Sequence
  source: /note="Description of Artificial Sequence: Synthetic peptide"
QVWDSDSEHVV

SEQ ID NO: 1337 - protein, 9 aa, Artificial Sequence
  source: /note="Description of Artificial Sequence: Synthetic peptide"
QAWDDTTVV

SEQ ID NO: 1338 - protein, 9 aa, Artificial Sequence
  source: /note="Description of Artificial Sequence: Synthetic peptide"
QKYNSAPFT

SEQ ID NO: 1339 - protein, 12 aa, Artificial Sequence
  source: /note="Description of Artificial Sequence: Synthetic peptide"
SSRDSSGDHLRV

SEQ ID NO: 1340 - protein, 11 aa, Artificial Sequence
  source: /note="Description of Artificial Sequence: Synthetic peptide"
NSRDSSGHHLL

SEQ ID NO: 1341 - protein, 14 aa, Artificial Sequence
  source: /note="Description of Artificial Sequence: Synthetic peptide"
QHYGSSFNGSSLFT

SEQ ID NO: 1342 - protein, 10 aa, Artificial Sequence
  source: /note="Description of Artificial Sequence: Synthetic peptide"
QQFGTSSGLT

SEQ ID NO: 1343 - protein, 10 aa, Artificial Sequence
  source: /note="Description of Artificial Sequence: Synthetic peptide"
QQYHSSPSWT

SEQ ID NO: 1344 - protein, 10 aa, Artificial Sequence
  source: /note="Description of Artificial Sequence: Synthetic peptide"
QQYHSSPSWT

SEQ ID NO: 1345 - protein, 9 aa, Artificial Sequence
  source: /note="Description of Artificial Sequence: Synthetic peptide"
QQSYSTPYS

SEQ ID NO: 1346 - protein, 10 aa, Artificial Sequence
  source: /note="Description of Artificial Sequence: Synthetic peptide"
QHYESSPSWT

SEQ ID NO: 1347 - protein, 10 aa, Artificial Sequence
  source: /note="Description of Artificial Sequence: Synthetic peptide"
QQYGSPPRFT

SEQ ID NO: 1348 - protein, 10 aa, Artificial Sequence
  source: /note="Description of Artificial Sequence: Synthetic peptide"
QHYGSSPSWT

SEQ ID NO: 1349 - protein, 10 aa, Artificial Sequence
  source: /note="Description of Artificial Sequence: Synthetic peptide"
QHYDSSPSWT

SEQ ID NO: 1350 - protein, 10 aa, Artificial Sequence
  source: /note="Description of Artificial Sequence: Synthetic peptide"
QYYGTSPMYT

SEQ ID NO: 1351 - protein, 9 aa, Artificial Sequence
  source: /note="Description of Artificial Sequence: Synthetic peptide"
MQALQTPLT

SEQ ID NO: 1352 - protein, 11 aa, Artificial Sequence
  source: /note="Description of Artificial Sequence: Synthetic peptide"
QHYGNSPPKFT

SEQ ID NO: 1353 - protein, 10 aa, Artificial Sequence
  source: /note="Description of Artificial Sequence: Synthetic peptide"
QHYGGSPRLT

SEQ ID NO: 1354 - protein, 9 aa, Artificial Sequence
  source: /note="Description of Artificial Sequence: Synthetic peptide"
QQHYSTPWT

SEQ ID NO: 1355 - protein, 9 aa, Artificial Sequence
  source: /note="Description of Artificial Sequence: Synthetic peptide"
LQSRIFPRT

SEQ ID NO: 1356 - protein, 9 aa, Artificial Sequence
  source: /note="Description of Artificial Sequence: Synthetic peptide"
LQSRTIPRT

SEQ ID NO: 1357 - protein, 9 aa, Artificial Sequence
  source: /note="Description of Artificial Sequence: Synthetic peptide"
LQSRTIPRT

SEQ ID NO: 1358-1467 - skipped (110 entries)

SEQ ID NO: 1468 - RNA, 2000 nt, Artificial Sequence
  source: /note="Description of Artificial Sequence: Synthetic polynucleotide"
  misc_feature (1)..(2000): /note="This sequence may encompass 50-2000 nucleotides"
aaaaaaaaaaaaaaaaaaaaaaaaaaaaaaaaaaaaaaaaaaaaaaaaaaaaaaaaaaaaaaaaaaaaaaaaaaaaaaaaaaaaaaaaaaaaaaaaaaaaaaaaaaaaaaaaaaaaaaaaaaaaaaaaaaaaaaaaaaaaaaaaaaaaaaaaaaaaaaaaaaaaaaaaaaaaaaaaaaaaaaaaaaaaaaaaaaaaaaaaaaaaaaaaaaaaaaaaaaaaaaaaaaaaaaaaaaaaaaaaaaaaaaaaaaaaaaaaaaaaaaaaaaaaaaaaaaaaaaaaaaaaaaaaaaaaaaaaaaaaaaaaaaaaaaaaaaaaaaaaaaaaaaaaaaaaaaaaaaaaaaaaaaaaaaaaaaaaaaaaaaaaaaaaaaaaaaaaaaaaaaaaaaaaaaaaaaaaaaaaaaaaaaaaaaaaaaaaaaaaaaaaaaaaaaaaaaaaaaaaaaaaaaaaaaaaaaaaaaaaaaaaaaaaaaaaaaaaaaaaaaaaaaaaaaaaaaaaaaaaaaaaaaaaaaaaaaaaaaaaaaaaaaaaaaaaaaaaaaaaaaaaaaaaaaaaaaaaaaaaaaaaaaaaaaaaaaaaaaaaaaaaaaaaaaaaaaaaaaaaaaaaaaaaaaaaaaaaaaaaaaaaaaaaaaaaaaaaaaaaaaaaaaaaaaaaaaaaaaaaaaaaaaaaaaaaaaaaaaaaaaaaaaaaaaaaaaaaaaaaaaaaaaaaaaaaaaaaaaaaaaaaaaaaaaaaaaaaaaaaaaaaaaaaaaaaaaaaaaaaaaaaaaaaaaaaaaaaaaaaaaaaaaaaaaaaaaaaaaaaaaaaaaaaaaaaaaaaaaaaaaaaaaaaaaaaaaaaaaaaaaaaaaaaaaaaaaaaaaaaaaaaaaaaaaaaaaaaaaaaaaaaaaaaaaaaaaaaaaaaaaaaaaaaaaaaaaaaaaaaaaaaaaaaaaaaaaaaaaaaaaaaaaaaaaaaaaaaaaaaaaaaaaaaaaaaaaaaaaaaaaaaaaaaaaaaaaaaaaaaaaaaaaaaaaaaaaaaaaaaaaaaaaaaaaaaaaaaaaaaaaaaaaaaaaaaaaaaaaaaaaaaaaaaaaaaaaaaaaaaaaaaaaaaaaaaaaaaaaaaaaaaaaaaaaaaaaaaaaaaaaaaaaaaaaaaaaaaaaaaaaaaaaaaaaaaaaaaaaaaaaaaaaaaaaaaaaaaaaaaaaaaaaaaaaaaaaaaaaaaaaaaaaaaaaaaaaaaaaaaaaaaaaaaaaaaaaaaaaaaaaaaaaaaaaaaaaaaaaaaaaaaaaaaaaaaaaaaaaaaaaaaaaaaaaaaaaaaaaaaaaaaaaaaaaaaaaaaaaaaaaaaaaaaaaaaaaaaaaaaaaaaaaaaaaaaaaaaaaaaaaaaaaaaaaaaaaaaaaaaaaaaaaaaaaaaaaaaaaaaaaaaaaaaaaaaaaaaaaaaaaaaaaaaaaaaaaaaaaaaaaaaaaaaaaaaaaaaaaaaaaaaaaaaaaaaaaaaaaaaaaaaaaaaaaaaaaaaaaaaaaaaaaaaaaaaaaaaaaaaaaaaaaaaaaaaaaaaaaaaaaaaaaaaaaaaaaaaaaaaaaaaaaaaaaaaaaaaaaaaaaaaaaaaaaaaaaaaaaaaaaaaaaaaaaaaaaaaaaaaaaaaaaaaaaaaaaaaaaaaaaaaaaaaaaaaaaaaaaaaaaaaaaaaaaaaaaaaaaaaaaaaaaaaaaaaaaaaaaaaaaaaaaaaaaaaaaaaaaaaaaaaaaaaaaaaaaaaaaaaaaaaaaaaaaaaaaaaaaaaaaaaaaaaaaaaaaaaaaaaaaaaaaaaaaaaaaaaaaaaaaaaaaaaaaaaaaaaaaaaaaaaaaaaaaaaaaaaaaaaaaaaaaaaaaaaaaaaaaaaaaaaaaaaaaaaaaaaaaaaaaaaaaaaaaaaaaaaaaaaaaaaaaaaaaaaaaaaaaaaaaaaaaaaaaaaaaaaaaaaaaaaaaaaaaaaaaaaaaaaaaaaaaaaaaaaaaaaaaaaaaaaaaaaaaaaaaaaaaaa

SEQ ID NO: 1469 - DNA, 100 bp, Artificial Sequence
  source: /note="Description of Artificial Sequence: Synthetic polynucleotide"
tttttttttttttttttttttttttttttttttttttttttttttttttttttttttttttttttttttttttttttttttttttttttttttttttttt

SEQ ID NO: 1470 - DNA, 5000 bp, Artificial Sequence
  source: /note="Description of Artificial Sequence: Synthetic polynucleotide"
  misc_feature (1)..(5000): /note="This sequence may encompass 50-5000 nucleotides"
tttttttttttttttttttttttttttttttttttttttttttttttttttttttttttttttttttttttttttttttttttttttttttttttttttttttttttttttttttttttttttttttttttttttttttttttttttttttttttttttttttttttttttttttttttttttttttttttttttttttttttttttttttttttttttttttttttttttttttttttttttttttttttttttttttttttttttttttttttttttttttttttttttttttttttttttttttttttttttttttttttttttttttttttttttttttttttttttttttttttttttttttttttttttttttttttttttttttttttttttttttttttttttttttttttttttttttttttttttttttttttttttttttttttttttttttttttttttttttttttttttttttttttttttttttttttttttttttttttttttttttttttttttttttttttttttttttttttttttttttttttttttttttttttttttttttttttttttttttttttttttttttttttttttttttttttttttttttttttttttttttttttttttttttttttttttttttttttttttttttttttttttttttttttttttttttttttttttttttttttttttttttttttttttttttttttttttttttttttttttttttttttttttttttttttttttttttttttttttttttttttttttttttttttttttttttttttttttttttttttttttttttttttttttttttttttttttttttttttttttttttttttttttttttttttttttttttttttttttttttttttttttttttttttttttttttttttttttttttttttttttttttttttttttttttttttttttttttttttttttttttttttttttttttttttttttttttttttttttttttttttttttttttttttttttttttttttttttttttttttttttttttttttttttttttttttttttttttttttttttttttttttttttttttttttttttttttttttttttttttttttttttttttttttttttttttttttttttttttttttttttttttttttttttttttttttttttttttttttttttttttttttttttttttttttttttttttttttttttttttttttttttttttttttttttttttttttttttttttttttttttttttttttttttttttttttttttttttttttttttttttttttttttttttttttttttttttttttttttttttttttttttttttttttttttttttttttttttttttttttttttttttttttttttttttttttttttttttttttttttttttttttttttttttttttttttttttttttttttttttttttttttttttttttttttttttttttttttttttttttttttttttttttttttttttttttttttttttttttttttttttttttttttttttttttttttttttttttttttttttttttttttttttttttttttttttttttttttttttttttttttttttttttttttttttttttttttttttttttttttttttttttttttttttttttttttttttttttttttttttttttttttttttttttttttttttttttttttttttttttttttttttttttttttttttttttttttttttttttttttttttttttttttttttttttttttttttttttttttttttttttttttttttttttttttttttttttttttttttttttttttttttttttttttttttttttttttttttttttttttttttttttttttttttttttttttttttttttttttttttttttttttttttttttttttttttttttttttttttttttttttttttttttttttttttttttttttttttttttttttttttttttttttttttttttttttttttttttttttttttttttttttttttttttttttttttttttttttttttttttttttttttttttttttttttttttttttttttttttttttttttttttttttttttttttttttttttttttttttttttttttttttttttttttttttttttttttttttttttttttttttttttttttttttttttttttttttttttttttttttttttttttttttttttttttttttttttttttttttttttttttttttttttttttttttttttttttttttttttttttttttttttttttttttttttttttttttttttttttttttttttttttttttttttttttttttttttttttttttttttttttttttttttttttttttttttttttttttttttttttttttttttttttttttttttttttttttttttttttttttttttttttttttttttttttttttttttttttttttttttttttttttttttttttttttttttttttttttttttttttttttttttttttttttttttttttttttttttttttttttttttttttttttttttttttttttttttttttttttttttttttttttttttttttttttttttttttttttttttttttttttttttttttttttttttttttttttttttttttttttttttttttttttttttttttttttttttttttttttttttttttttttttttttttttttttttttttttttttttttttttttttttttttttttttttttttttttttttttttttttttttttttttttttttttttttttttttttttttttttttttttttttttttttttttttttttttttttttttttttttttttttttttttttttttttttttttttttttttttttttttttttttttttttttttttttttttttttttttttttttttttttttttttttttttttttttttttttttttttttttttttttttttttttttttttttttttttttttttttttttttttttttttttttttttttttttttttttttttttttttttttttttttttttttttttttttttttttttttttttttttttttttttttttttttttttttttttttttttttttttttttttttttttttttttttttttttttttttttttttttttttttttttttttttttttttttttttttttttttttttttttttttttttttttttttttttttttttttttttttttttttttttttttttttttttttttttttttttttttttttttttttttttttttttttttttttttttttttttttttttttttttttttttttttttttttttttttttttttttttttttttttttttttttttttttttttttttttttttttttttttttttttttttttttttttttttttttttttttttttttttttttttttttttttttttttttttttttttttttttttttttttttttttttttttttttttttttttttttttttttttttttttttttttttttttttttttttttttttttttttttttttttttttttttttttttttttttttttttttttttttttttttttttttttttttttttttttttttttttttttttttttttttttttttttttttttttttttttttttttttttttttttttttttttttttttttttttttttttttttttttttttttttttttttttttttttttttttttttttttttttttttttttttttttttttttttttttttttttttttttttttttttttttttttttttttttttttttttttttttttttttttttttttttttttttttttttttttttttttttttttttttttttttttttttttttttttttttttttttttttttttttttttttttttttttttttttttttttttttttttttttttttttttttttttttttttttttttttttttttttttttttttttttttttttttttttttttttttttttttttttttttttttttttttttttttttttttttttttttttttttttttttttttttttttttttttttttttttttttttttttttttttttttttttttttttttttttttttttttttttttttttttttttttttttttttttttttttttttttttttttttttttttttttttttttttttttttttttttttttttttttttttttttttttttttttttttttttttttttttttttttttttttttttttttttttttttttttttttttttttttttttttttttttttttttttttttttttttttttttttttttttttttttttttttttttttttttttttttttttttttttttttttttttttttttttttttttttttttttttttttttttttttttttttttttttttttttttttttttttttttttttttttttttttttttttttttttttttttttttttttttttttttttttttttttttttttttttttttttttttttttttttttttttttttttttttttttttttttttttttttttttttttttttttttttttttttttttttttttttttttttttttttttttttttttttttttttttttttttttttttttttttttttttttttttttttttttttttttttttttttttttttttttttttttttttttttttttttttttttttttttttttttttttttttttttttttttttttttttttttttttttttttttttttttttttttttttttttttttttttt

SEQ ID NO: 1471 - RNA, 5000 nt, Artificial Sequence; identical to SEQ ID NO: 1013
  source: /note="Description of Artificial Sequence: Synthetic polynucleotide"
  misc_feature (1)..(5000): /note="This sequence may encompass 100-5000 nucleotides"

SEQ ID NO: 1472 - RNA, 400 nt, Artificial Sequence
  source: /note="Description of Artificial Sequence: Synthetic polynucleotide"
  misc_feature (1)..(400): /note="This sequence may encompass 100-400 nucleotides"
aaaaaaaaaaaaaaaaaaaaaaaaaaaaaaaaaaaaaaaaaaaaaaaaaaaaaaaaaaaaaaaaaaaaaaaaaaaaaaaaaaaaaaaaaaaaaaaaaaaaaaaaaaaaaaaaaaaaaaaaaaaaaaaaaaaaaaaaaaaaaaaaaaaaaaaaaaaaaaaaaaaaaaaaaaaaaaaaaaaaaaaaaaaaaaaaaaaaaaaaaaaaaaaaaaaaaaaaaaaaaaaaaaaaaaaaaaaaaaaaaaaaaaaaaaaaaaaaaaaaaaaaaaaaaaaaaaaaaaaaaaaaaaaaaaaaaaaaaaaaaaaaaaaaaaaaaaaaaaaaaaaaaaaaaaaaaaaaaaaaaaaaaaaaaaaaaaaaaaaaaaaaaaaaaaaaaaaaaaaaaaaaaaaaaaaaaaaaaaaa

SEQ ID NO: 1473 - DNA, 521 bp, Unknown
  source: /note="Description of Unknown: PGK promoter sequence"
acccctctctccagccactaagccagttgctccctcggctgacggctgcacgcgaggcctccgaacgtcttacgccttgtggcgcgcccgtccttgtcccgggtgtgatggcggggtgtggggcggagggcgtggcggggaagggccggcgacgagagccgcgcgggacgactcgtcggcgataaccggtgtcgggtagcgccagccgcgcgacggtaacgagggaccgcgacaggcagacgctcccatgatcactctgcacgccgaaggcaaatagtgcaggccgtgcggcgcttggcgttccttggaagggctgaatccccgcctcgtccttcgcagcggccccccgggtgttcccatcgccgcttctaggcccactgcgacgcttgcctgcacttcttacacgctctgggtcccagccgcggcgacgcaaagggccttggtgcgggtctcgtcggcgcagggacgcgtttgggtcccgacggaaccttttccgcgttggggttggggcaccataagct

SEQ ID NO: 1474 - DNA, 118 bp, Artificial Sequence
  source: /note="Description of Artificial Sequence: Synthetic polynucleotide"
acccctctctccagccactaagccagttgctccctcggctgacggctgcacgcgaggcctccgaacgtcttacgccttgtggcgcgcccgtccttgtcccgggtgtgatggcggggtg

SEQ ID NO: 1475 - DNA, 221 bp, Artificial Sequence
  source: /note="Description of Artificial Sequence: Synthetic polynucleotide"
acccctctctccagccactaagccagttgctccctcggctgacggctgcacgcgaggcctccgaacgtcttacgccttgtggcgcgcccgtccttgtcccgggtgtgatggcggggtgtggggcggagggcgtggcggggaagggccggcgacgagagccgcgcgggacgactcgtcggcgataaccggtgtcgggtagcgccagccgcgcgacggtaacg

SEQ ID NO: 1476 - DNA, 324 bp, Artificial Sequence
  source: /note="Description of Artificial Sequence: Synthetic polynucleotide"
acccctctctccagccactaagccagttgctccctcggctgacggctgcacgcgaggcctccgaacgtcttacgccttgtggcgcgcccgtccttgtcccgggtgtgatggcggggtgtggggcggagggcgtggcggggaagggccggcgacgagagccgcgcgggacgactcgtcggcgataaccggtgtcgggtagcgccagccgcgcgacggtaacgagggaccgcgacaggcagacgctcccatgatcactctgcacgccgaaggcaaatagtgcaggccgtgcggcgcttggcgttccttggaagggctgaatccccg

SEQ ID NO: 1477 - DNA, 422 bp, Artificial Sequence
  source: /note="Description of Artificial Sequence: Synthetic polynucleotide"
acccctctctccagccactaagccagttgctccctcggctgacggctgcacgcgaggcctccgaacgtcttacgccttgtggcgcgcccgtccttgtcccgggtgtgatggcggggtgtggggcggagggcgtggcggggaagggccggcgacgagagccgcgcgggacgactcgtcggcgataaccggtgtcgggtagcgccagccgcgcgacggtaacgagggaccgcgacaggcagacgctcccatgatcactctgcacgccgaaggcaaatagtgcaggccgtgcggcgcttggcgttccttggaagggctgaatccccgcctcgtccttcgcagcggccccccgggtgttcccatcgccgcttctaggcccactgcgacgcttgcctgcacttcttacacgctctgggtcccagccg

SEQ ID NO: 1478 - protein, 21 aa, Artificial Sequence
  source: /note="Description of Artificial Sequence: Synthetic peptide"
  VARIANT (1)..(3): /replace=" "
  SITE (1)..(21): /note="Variant residues given in the sequence have no preference with respect to those in the annotations for variant positions"
GSGEGRGSLLTCGDVEENPGP

SEQ ID NO: 1479 - protein, 22 aa, Artificial Sequence
  source: /note="Description of Artificial Sequence: Synthetic peptide"
  VARIANT (1)..(3): /replace=" "
  SITE (1)..(22): /note="Variant residues given in the sequence have no preference with respect to those in the annotations for variant positions"
GSGATNFSLLKQAGDVEENPGP

SEQ ID NO: 1480 - protein, 23 aa, Artificial Sequence
  source: /note="Description of Artificial Sequence: Synthetic peptide"
  VARIANT (1)..(3): /replace=" "
  SITE (1)..(23): /note="Variant residues given in the sequence have no preference with respect to those in the annotations for variant positions"
GSGQCTNYALLKLAGDVESNPGP

SEQ ID NO: 1481 - protein, 25 aa, Artificial Sequence
  source: /note="Description of Artificial Sequence: Synthetic peptide"
  VARIANT (1)..(3): /replace=" "
  SITE (1)..(25): /note="Variant residues given in the sequence have no preference with respect to those in the annotations for variant positions"
GSGVKQTLNFDLLKLAGDVESNPGP

SEQ ID NO: 1482-2017 - skipped (536 entries)

SEQ ID NO: 2018 - DNA, 723 bp, Artificial Sequence
  source: /note="Description of Artificial Sequence: Synthetic polynucleotide"
gaggtgcagttggtcgaaagcgggggcgggcttgtgcagcctggcggatcactgcggctgtcctgcgcggcatcaggcttcacgttttcttcctacgccatgtcctgggtgcgccaggcccctggaaagggactggaatgggtgtccgcgatttcggggtccggcgggagcacctactacgccgattccgtgaagggccgcttcactatctcgcgggacaactccaagaacaccctctacctccaaatgaatagcctgcgggccgaggataccgccgtctactattgcgctaaggtcgtgcgcgacggaatggacgtgtggggacagggtaccaccgtgacagtgtcctcggggggaggcggtagcggcggaggaggaagcggtggtggaggttccgagattgtgctgactcaatcacccgcgaccctgagcctgtcccccggcgaaagggccactctgtcctgtcgggccagccaatcagtctcctcctcgtacctggcctggtaccagcagaagccaggacaggctccgagactccttatctatggcgcatcctcccgcgccaccggaatcccggataggttctcgggaaacggatcggggaccgacttcactctcaccatctcccggctggaaccggaggacttcgccgtgtactactgccagcagtacggcagcccgcctagattcactttcggccccggcaccaaagtggacatcaag

SEQ ID NO: 2019 - protein, 5 aa, Artificial Sequence
  source: /note="Description of Artificial Sequence: Synthetic peptide"
NYNLH

SEQ ID NO: 2020 - protein, 17 aa, Artificial Sequence
  source: /note="Description of Artificial Sequence: Synthetic peptide"
AIYPGNYDTSYNQKFKG

SEQ ID NO: 2021 - protein, 13 aa, Artificial Sequence
  source: /note="Description of Artificial Sequence: Synthetic peptide"
VDFGHSRYWYFDV

SEQ ID NO: 2022 - protein, 7 aa, Artificial Sequence
  source: /note="Description of Artificial Sequence: Synthetic peptide"
GYTFTNY

SEQ ID NO: 2023 - protein, 6 aa, Artificial Sequence
  source: /note="Description of Artificial Sequence: Synthetic peptide"
YPGNYD

SEQ ID NO: 2024 - protein, 8 aa, Artificial Sequence
  source: /note="Description of Artificial Sequence: Synthetic peptide"
GYTFTNYN

SEQ ID NO: 2025 - protein, 8 aa, Artificial Sequence
  source: /note="Description of Artificial Sequence: Synthetic peptide"
IYPGNYDT

SEQ ID NO: 2026 - protein, 15 aa, Artificial Sequence
  source: /note="Description of Artificial Sequence: Synthetic peptide"
ARVDFGHSRYWYFDV

SEQ ID NO: 2027 - protein, 10 aa, Artificial Sequence
  source: /note="Description of Artificial Sequence: Synthetic peptide"
GYTFTNYNLH

SEQ ID NO: 2028 - protein, 122 aa, Artificial Sequence
  source: /note="Description of Artificial Sequence: Synthetic polypeptide"
QVQLVQSGAEVKKPGASVKVSCKASGYTFTNYNLHWVRQAPGQGLEWMGAIYPGNYDTSYNQKFKGRVTMTADKSTSTAYMELSSLRSEDTAVYYCARVDFGHSRYWYFDVWGQGTTVTVSS

SEQ ID NO: 2029 - DNA, 366 bp, Artificial Sequence
  source: /note="Description of Artificial Sequence: Synthetic polynucleotide"
caagtccaactcgtccagtccggtgcagaagtcaagaaacctggagcatccgtgaaagtgtcttgcaaagcctccggctacaccttcaccaactacaacctccattgggtcagacaggcccccggacaaggactcgaatggatgggagcgatctacccgggaaactacgacaccagctacaaccagaagttcaagggccgcgtgactatgaccgccgataagagcacctccaccgcctacatggaactgtcctcgctgaggtccgaggacactgcggtgtactactgcgcccgcgtggacttcggacactcacggtattggtacttcgacgtctggggacagggcactaccgtgaccgtgtcgagc

SEQ ID NO: 2030 - protein, 10 aa, Artificial Sequence
  source: /note="Description of Artificial Sequence: Synthetic peptide"
RATSSVSSMN

SEQ ID NO: 2031 - protein, 7 aa, Artificial Sequence
  source: /note="Description of Artificial Sequence: Synthetic peptide"
ATSNLAS

SEQ ID NO: 2032 - protein, 9 aa, Artificial Sequence
  source: /note="Description of Artificial Sequence: Synthetic peptide"
QQWTFNPPT

SEQ ID NO: 2033 - protein, 6 aa, Artificial Sequence
  source: /note="Description of Artificial Sequence: Synthetic peptide"
TSSVSS

SEQ ID NO: 2034 - protein, 3 aa, Artificial Sequence
  source: /note="Description of Artificial Sequence: Synthetic peptide"
ATS

SEQ ID NO: 2035 - protein, 6 aa, Artificial Sequence
  source: /note="Description of Artificial Sequence: Synthetic peptide"
WTFNPP

SEQ ID NO: 2036 - protein, 5 aa, Artificial Sequence
  source: /note="Description of Artificial Sequence: Synthetic peptide"
SSVSS

SEQ ID NO: 2037 - protein, 106 aa, Artificial Sequence
  source: /note="Description of Artificial Sequence: Synthetic polypeptide"
DIQLTQSPSFLSASVGDRVTITCRATSSVSSMNWYQQKPGKAPKPLIHATSNLASGVPSRFSGSGSGTEYTLTISSLQPEDFATYYCQQWTFNPPTFGQGTKLEIK

SEQ ID NO: 2038 - DNA, 318 bp, Artificial Sequence
  source: /note="Description of Artificial Sequence: Synthetic polynucleotide"
gatatccagctgactcagtccccgtcattcctgtccgcctccgtgggagacagagtgaccatcacctgtcgggccacttcctccgtgtcaagcatgaactggtatcagcagaagcccgggaaggccccaaagccgctgattcacgcgacgtccaacctggcttccggcgtgccgagccggttctccggctcggggagcgggactgagtacaccctgactatttcctcgcttcaacccgaggactttgctacctactactgccaacagtggaccttcaatcctccgacattcggacagggtaccaagttggaaatcaag

SEQ ID NO: 2039 - protein, 248 aa, Artificial Sequence
  source: /note="Description of Artificial Sequence: Synthetic polypeptide"
QVQLVQSGAEVKKPGASVKVSCKASGYTFTNYNLHWVRQAPGQGLEWMGAIYPGNYDTSYNQKFKGRVTMTADKSTSTAYMELSSLRSEDTAVYYCARVDFGHSRYWYFDVWGQGTTVTVSSGGGGSGGGGSGGGGSGGGGSDIQLTQSPSFLSASVGDRVTITCRATSSVSSMNWYQQKPGKAPKPLIHATSNLASGVPSRFSGSGSGTEYTLTISSLQPEDFATYYCQQWTFNPPTFGQGTKLEIK

SEQ ID NO: 2040 - DNA, 744 bp, Artificial Sequence
  source: /note="Description of Artificial Sequence: Synthetic polynucleotide"
caagtccaactcgtccagtccggtgcagaagtcaagaaacctggagcatccgtgaaagtgtcttgcaaagcctccggctacaccttcaccaactacaacctccattgggtcagacaggcccccggacaaggactcgaatggatgggagcgatctacccgggaaactacgacaccagctacaaccagaagttcaagggccgcgtgactatgaccgccgataagagcacctccaccgcctacatggaactgtcctcgctgaggtccgaggacactgcggtgtactactgcgcccgcgtggacttcggacactcacggtattggtacttcgacgtctggggacagggcactaccgtgaccgtgtcgagcggcggaggaggttcgggagggggcggatcagggggcggcggcagcggtggagggggctcggatatccagctgactcagtccccgtcattcctgtccgcctccgtgggagacagagtgaccatcacctgtcgggccacttcctccgtgtcaagcatgaactggtatcagcagaagcccgggaaggccccaaagccgctgattcacgcgacgtccaacctggcttccggcgtgccgagccggttctccggctcggggagcgggactgagtacaccctgactatttcctcgcttcaacccgaggactttgctacctactactgccaacagtggaccttcaatcctccgacattcggacagggtaccaagttggaaatcaag

SEQ ID NO: 2041 - protein, 492 aa, Artificial Sequence
  source: /note="Description of Artificial Sequence: Synthetic polypeptide"
MALPVTALLLPLALLLHAARPQVQLVQSGAEVKKPGASVKVSCKASGYTFTNYNLHWVRQAPGQGLEWMGAIYPGNYDTSYNQKFKGRVTMTADKSTSTAYMELSSLRSEDTAVYYCARVDFGHSRYWYFDVWGQGTTVTVSSGGGGSGGGGSGGGGSGGGGSDIQLTQSPSFLSASVGDRVTITCRATSSVSSMNWYQQKPGKAPKPLIHATSNLASGVPSRFSGSGSGTEYTLTISSLQPEDFATYYCQQWTFNPPTFGQGTKLEIKTTTPAPRPPTPAPTIASQPLSLRPEACRPAAGGAVHTRGLDFACDIYIWAPLAGTCGVLLLSLVITLYCKRGRKKLLYIFKQPFMRPVQTTQEEDGCSCRFPEEEEGGCELRVKFSRSADAPAYQQGQNQLYNELNLGRREEYDVLDKRRGRDPEMGGKPRRKNPQEGLYNELQKDKMAEAYSEIGMKGERRRGKGHDGLYQGLSTATKDTYDALHMQALPPR

SEQ ID NO: 2042 - DNA, 1476 bp, Artificial Sequence
  source: /note="Description of Artificial Sequence: Synthetic polynucleotide"
atggccctccctgtcaccgccctgctgcttccgctggctcttctgctccacgccgctcggccccaagtccaactcgtccagtccggtgcagaagtcaagaaacctggagcatccgtgaaagtgtcttgcaaagcctccggctacaccttcaccaactacaacctccattgggtcagacaggcccccggacaaggactcgaatggatgggagcgatctacccgggaaactacgacaccagctacaaccagaagttcaagggccgcgtgactatgaccgccgataagagcacctccaccgcctacatggaactgtcctcgctgaggtccgaggacactgcggtgtactactgcgcccgcgtggacttcggacactcacggtattggtacttcgacgtctggggacagggcactaccgtgaccgtgtcgagcggcggaggaggttcgggagggggcggatcagggggcggcggcagcggtggagggggctcggatatccagctgactcagtccccgtcattcctgtccgcctccgtgggagacagagtgaccatcacctgtcgggccacttcctccgtgtcaagcatgaactggtatcagcagaagcccgggaaggccccaaagccgctgattcacgcgacgtccaacctggcttccggcgtgccgagccggttctccggctcggggagcgggactgagtacaccctgactatttcctcgcttcaacccgaggactttgctacctactactgccaacagtggaccttcaatcctccgacattcggacagggtaccaagttggaaatcaagaccactaccccagcaccgaggccacccaccccggctcctaccatcgcctcccagcctctgtccctgcgtccggaggcatgtagacccgcagctggtggggccgtgcatacccggggtcttgacttcgcctgcgatatctacatttgggcccctctggctggtacttgcggggtcctgctgctttcactcgtgatcactctttactgtaagcgcggtcggaagaagctgctgtacatctttaagcaacccttcatgaggcctgtgcagactactcaagaggaggacggctgttcatgccggttcccagaggaggaggaaggcggctgcgaactgcgcgtgaaattcagccgcagcgcagatgctccagcctaccagcaggggcagaaccagctctacaacgaactcaatcttggtcggagagaggagtacgacgtgctggacaagcggagaggacgggacccagaaatgggcgggaagccgcgcagaaagaatccccaagagggcctgtacaacgagctccaaaaggataagatggcagaagcctatagcgagattggtatgaaaggggaacgcagaagaggcaaaggccacgacggactgtaccagggactcagcaccgccaccaaggacacctatgacgctcttcacatgcaggccctgccgcctcgg

SEQ ID NO: 2043 - protein, 5 aa, Artificial Sequence
  source: /note="Description of Artificial Sequence: Synthetic peptide"
SYNMH

SEQ ID NO: 2044 - protein, 17 aa, Artificial Sequence
  source: /note="Description of Artificial Sequence: Synthetic peptide"
AIYPGNGDTSYNPKFKG

SEQ ID NO: 2045 - protein, 13 aa, Artificial Sequence
  source: /note="Description of Artificial Sequence: Synthetic peptide"
SYFYGSSSWYFDV

SEQ ID NO: 2046 - protein, 7 aa, Artificial Sequence
  source: /note="Description of Artificial Sequence: Synthetic peptide"
GYTFTSY

SEQ ID NO: 2047 - protein, 6 aa, Artificial Sequence
  source: /note="Description of Artificial Sequence: Synthetic peptide"
YPGNGD

SEQ ID NO: 2048 - protein, 8 aa, Artificial Sequence
  source: /note="Description of Artificial Sequence: Synthetic peptide"
GYTFTSYN

SEQ ID NO: 2049 - protein, 8 aa, Artificial Sequence
  source: /note="Description of Artificial Sequence: Synthetic peptide"
IYPGNGDT

SEQ ID NO: 2050 - protein, 15 aa, Artificial Sequence
  source: /note="Description of Artificial Sequence: Synthetic peptide"
ARSYFYGSSSWYFDV

SEQ ID NO: 2051 - protein, 10 aa, Artificial Sequence
  source: /note="Description of Artificial Sequence: Synthetic peptide"
GYTFTSYNMH

SEQ ID NO: 2052 - protein, 122 aa, Artificial Sequence
  source: /note="Description of Artificial Sequence: Synthetic polypeptide"
QVQLVQSGAEVKKPGASVKVSCKASGYTFTSYNMHWVRQAPGQGLEWMGAIYPGNGDTSYNPKFKGRVTMTADKSTRTAYMELSSLRSEDTAVYYCARSYFYGSSSWYFDVWGQGTTVTVSS

SEQ ID NO: 2053 - DNA, 366 bp, Artificial Sequence
  source: /note="Description of Artificial Sequence: Synthetic polynucleotide"
caagtgcagctcgtccagtccggtgcagaagtcaagaaacccggtgcttcagtgaaagtgtcctgcaaggcctccggttacaccttcacctcctacaacatgcactgggtccgccaagccccgggccagggactcgaatggatgggagccatctaccctggcaacggggacacctcatacaaccctaagttcaagggcagagtgaccatgactgcggacaagtccactagaacagcgtacatggagctgagcagcctgcggtccgaggatactgccgtgtactactgcgcccgctcctacttctacggaagctcgtcgtggtacttcgatgtctggggacagggcaccactgtgactgtgtcctcc

SEQ ID NO: 2054 - protein, 10 aa, Artificial Sequence
  source: /note="Description of Artificial Sequence: Synthetic peptide"
RASSSVSSMH

SEQ ID NO: 2055 - protein, 9 aa, Artificial Sequence
  source: /note="Description of Artificial Sequence: Synthetic peptide"
QQWIFNPPT

SEQ ID NO: 2056 - protein, 6 aa, Artificial Sequence
  source: /note="Description of Artificial Sequence: Synthetic peptide"
SSSVSS

SEQ ID NO: 2057 - protein, 6 aa, Artificial Sequence
  source: /note="Description of Artificial Sequence: Synthetic peptide"
WIFNPP

SEQ ID NO: 2058 - protein, 106 aa, Artificial Sequence
  source: /note="Description of Artificial Sequence: Synthetic polypeptide"
EIVLTQSPATLSLSPGERATLSCRASSSVSSMHWYQQKPGQAPRPLIFATSNLASGIPARFSGSGSGTDYTLTISSLEPEDAAVYYCQQWIFNPPTFGGGTKVEIK

SEQ ID NO: 2059 - DNA, 318 bp, Artificial Sequence
  source: /note="Description of Artificial Sequence: Synthetic polynucleotide"
gaaattgtgctgactcagagccccgccaccctgagcttgtcccccggggaaagggcaacgctgtcatgccgcgcctcgtcatccgtgtcctccatgcattggtaccagcagaagccgggacaggcccctcggccgctgatcttcgccacctccaatctcgcttccggcattccggcccggttctcgggaagcgggtcggggaccgactataccctgaccatctctagccttgaacctgaggacgccgcggtgtactattgtcaacagtggatctttaaccccccaaccttcggtggaggcaccaaagtggagattaag

SEQ ID NO: 2060 - protein, 248 aa, Artificial Sequence
  source: /note="Description of Artificial Sequence: Synthetic polypeptide"
QVQLVQSGAEVKKPGASVKVSCKASGYTFTSYNMHWVRQAPGQGLEWMGAIYPGNGDTSYNPKFKGRVTMTADKSTRTAYMELSSLRSEDTAVYYCARSYFYGSSSWYFDVWGQGTTVTVSSGGGGSGGGGSGGGGSGGGGSEIVLTQSPATLSLSPGERATLSCRASSSVSSMHWYQQKPGQAPRPLIFATSNLASGIPARFSGSGSGTDYTLTISSLEPEDAAVYYCQQWIFNPPTFGGGTKVEIK

SEQ ID NO: 2061 - DNA, 744 bp, Artificial Sequence
  source: /note="Description of Artificial Sequence: Synthetic polynucleotide"
caagtgcagctcgtccagtccggtgcagaagtcaagaaacccggtgcttcagtgaaagtgtcctgcaaggcctccggttacaccttcacctcctacaacatgcactgggtccgccaagccccgggccagggactcgaatggatgggagccatctaccctggcaacggggacacctcatacaaccctaagttcaagggcagagtgaccatgactgcggacaagtccactagaacagcgtacatggagctgagcagcctgcggtccgaggatactgccgtgtactactgcgcccgctcctacttctacggaagctcgtcgtggtacttcgatgtctggggacagggcaccactgtgactgtgtcctccggtggcggaggctcgggcggaggcggaagcggcggcgggggatcgggaggaggagggtccgaaattgtgctgactcagagccccgccaccctgagcttgtcccccggggaaagggcaacgctgtcatgccgcgcctcgtcatccgtgtcctccatgcattggtaccagcagaagccgggacaggcccctcggccgctgatcttcgccacctccaatctcgcttccggcattccggcccggttctcgggaagcgggtcggggaccgactataccctgaccatctctagccttgaacctgaggacgccgcggtgtactattgtcaacagtggatctttaaccccccaaccttcggtggaggcaccaaagtggagattaag

SEQ ID NO: 2062 - protein, 492 aa, Artificial Sequence
  source: /note="Description of Artificial Sequence: Synthetic polypeptide"
MALPVTALLLPLALLLHAARPQVQLVQSGAEVKKPGASVKVSCKASGYTFTSYNMHWVRQAPGQGLEWMGAIYPGNGDTSYNPKFKGRVTMTADKSTRTAYMELSSLRSEDTAVYYCARSYFYGSSSWYFDVWGQGTTVTVSSGGGGSGGGGSGGGGSGGGGSEIVLTQSPATLSLSPGERATLSCRASSSVSSMHWYQQKPGQAPRPLIFATSNLASGIPARFSGSGSGTDYTLTISSLEPEDAAVYYCQQWIFNPPTFGGGTKVEIKTTTPAPRPPTPAPTIASQPLSLRPEACRPAAGGAVHTRGLDFACDIYIWAPLAGTCGVLLLSLVITLYCKRGRKKLLYIFKQPFMRPVQTTQEEDGCSCRFPEEEEGGCELRVKFSRSADAPAYQQGQNQLYNELNLGRREEYDVLDKRRGRDPEMGGKPRRKNPQEGLYNELQKDKMAEAYSEIGMKGERRRGKGHDGLYQGLSTATKDTYDALHMQALPPR

SEQ ID NO: 2063 - DNA, 1476 bp, Artificial Sequence
  source: /note="Description of Artificial Sequence: Synthetic polynucleotide"
atggccctccctgtcaccgccctgctgcttccgctggctcttctgctccacgccgctcggccccaagtgcagctcgtccagtccggtgcagaagtcaagaaacccggtgcttcagtgaaagtgtcctgcaaggcctccggttacaccttcacctcctacaacatgcactgggtccgccaagccccgggccagggactcgaatggatgggagccatctaccctggcaacggggacacctcatacaaccctaagttcaagggcagagtgaccatgactgcggacaagtccactagaacagcgtacatggagctgagcagcctgcggtccgaggatactgccgtgtactactgcgcccgctcctacttctacggaagctcgtcgtggtacttcgatgtctggggacagggcaccactgtgactgtgtcctccggtggcggaggctcgggcggaggcggaagcggcggcgggggatcgggaggaggagggtccgaaattgtgctgactcagagccccgccaccctgagcttgtcccccggggaaagggcaacgctgtcatgccgcgcctcgtcatccgtgtcctccatgcattggtaccagcagaagccgggacaggcccctcggccgctgatcttcgccacctccaatctcgcttccggcattccggcccggttctcgggaagcgggtcggggaccgactataccctgaccatctctagccttgaacctgaggacgccgcggtgtactattgtcaacagtggatctttaaccccccaaccttcggtggaggcaccaaagtggagattaagaccactaccccagcaccgaggccacccaccccggctcctaccatcgcctcccagcctctgtccctgcgtccggaggcatgtagacccgcagctggtggggccgtgcatacccggggtcttgacttcgcctgcgatatctacatttgggcccctctggctggtacttgcggggtcctgctgctttcactcgtgatcactctttactgtaagcgcggtcggaagaagctgctgtacatctttaagcaacccttcatgaggcctgtgcagactactcaagaggaggacggctgttcatgccggttcccagaggaggaggaaggcggctgcgaactgcgcgtgaaattcagccgcagcgcagatgctccagcctaccagcaggggcagaaccagctctacaacgaactcaatcttggtcggagagaggagtacgacgtgctggacaagcggagaggacgggacccagaaatgggcgggaagccgcgcagaaagaatccccaagagggcctgtacaacgagctccaaaaggataagatggcagaagcctatagcgagattggtatgaaaggggaacgcagaagaggcaaaggccacgacggactgtaccagggactcagcaccgccaccaaggacacctatgacgctcttcacatgcaggccctgccgcctcgg

SEQ ID NO: 2064 - protein, 5 aa, Artificial Sequence
  source: /note="Description of Artificial Sequence: Synthetic peptide"
NYWMH

SEQ ID NO: 2065 - protein, 17 aa, Artificial Sequence
  source: /note="Description of Artificial Sequence: Synthetic peptide"
FITPTTGYPEYNQKFKD

SEQ ID NO: 2066 - protein, 13 aa, Artificial Sequence
  source: /note="Description of Artificial Sequence: Synthetic peptide"
RKVGKGVYYALDY

SEQ ID NO: 2067 - protein, 6 aa, Artificial Sequence
  source: /note="Description of Artificial Sequence: Synthetic peptide"
TPTTGY

SEQ ID NO: 2068 - protein, 8 aa, Artificial Sequence
  source: /note="Description of Artificial Sequence: Synthetic peptide"
GYTFTNYW

SEQ ID NO: 2069 - protein, 8 aa, Artificial Sequence
  source: /note="Description of Artificial Sequence: Synthetic peptide"
ITPTTGYP

SEQ ID NO: 2070 - protein, 15 aa, Artificial Sequence
  source: /note="Description of Artificial Sequence: Synthetic peptide"
ARRKVGKGVYYALDY

SEQ ID NO: 2071 - protein, 10 aa, Artificial Sequence
  source: /note="Description of Artificial Sequence: Synthetic peptide"
GYTFTNYWMH

SEQ ID NO: 2072 - protein, 122 aa, Artificial Sequence
  source: /note="Description of Artificial Sequence: Synthetic polypeptide"
QVQLVQSGAEVKKPGASVKVSCKASGYTFTNYWMHWVRQAPGQGLEWMGFITPTTGYPEYNQKFKDRVTMTADKSTSTAYMELSSLRSEDTAVYYCARRKVGKGVYYALDYWGQGTTVTVSS

SEQ ID NO: 2073 - DNA, 366 bp, Artificial Sequence
  source: /note="Description of Artificial Sequence: Synthetic polynucleotide"
caagtgcaactcgtccagtccggtgcagaagtcaagaaaccaggcgcatccgtgaaagtctcctgcaaagcctccggctacacattcactaactattggatgcattgggtgcgccaggccccgggacaggggctggagtggatggggttcattacccctaccaccggctaccctgagtacaaccagaagttcaaggatagggtcaccatgaccgctgacaagtccacctccaccgcgtacatggaactgtcatcgctccggtccgaggataccgcggtgtactactgcgcccggagaaaagtcggaaagggagtgtattacgccttggactactggggacaggggactaccgtgaccgtgtcgagc

SEQ ID NO: 2074 - protein, 11 aa, Artificial Sequence
  source: /note="Description of Artificial Sequence: Synthetic peptide"
RASGNIHNYLA

SEQ ID NO: 2075 - protein, 7 aa, Artificial Sequence
  source: /note="Description of Artificial Sequence: Synthetic peptide"
NTKTLAD

SEQ ID NO: 2076 - protein, 9 aa, Artificial Sequence
  source: /note="Description of Artificial Sequence: Synthetic peptide"
QHFWSSPWT

SEQ ID NO: 2077 - protein, 7 aa, Artificial Sequence
  source: /note="Description of Artificial Sequence: Synthetic peptide"
SGNIHNY

SEQ ID NO: 2078 - protein, 3 aa, Artificial Sequence
  source: /note="Description of Artificial Sequence: Synthetic peptide"
NTK

SEQ ID NO: 2079 - protein, 6 aa, Artificial Sequence
  source: /note="Description of Artificial Sequence: Synthetic peptide"
FWSSPW

SEQ ID NO: 2080 - protein, 6 aa, Artificial Sequence
  source: /note="Description of Artificial Sequence: Synthetic peptide"
GNIHNY

SEQ ID NO: 2081 - protein, 107 aa, Artificial Sequence
  source: /note="Description of Artificial Sequence: Synthetic polypeptide"
DIQMTQSPSSLSASVGDRVTITCRASGNIHNYLAWYQQKPGKVPKLLIYNTKTLADGVPSRFSGSGSGTDYTLTISSLQPEDVATYYCQHFWSSPWTFGGGTKVEIK

SEQ ID NO: 2082 - DNA, 321 bp, Artificial Sequence
  source: /note="Description of Artificial Sequence: Synthetic polynucleotide"
gacatccagatgacccagtccccgtcaagccttagcgcctccgtgggcgaccgcgtgaccattacttgtcgggcgtcgggaaacatccacaactacctcgcctggtaccagcagaagccgggaaaggtccccaagctgctgatctacaataccaagactctggccgacggagtgccttcccgcttttccggttcgggaagcgggactgactacaccctgactatctcctcgctgcaacccgaagatgtggctacgtactactgccagcacttctggtcctctccctggaccttcggcggtggcactaaggtcgagattaag

SEQ ID NO: 2083 - protein, 249 aa, Artificial Sequence
  source: /note="Description of Artificial Sequence: Synthetic polypeptide"
QVQLVQSGAEVKKPGASVKVSCKASGYTFTNYWMHWVRQAPGQGLEWMGFITPTTGYPEYNQKFKDRVTMTADKSTSTAYMELSSLRSEDTAVYYCARRKVGKGVYYALDYWGQGTTVTVSSGGGGSGGGGSGGGGSGGGGSDIQMTQSPSSLSASVGDRVTITCRASGNIHNYLAWYQQKPGKVPKLLIYNTKTLADGVPSRFSGSGSGTDYTLTISSLQPEDVATYYCQHFWSSPWTFGGGTKVEIK

SEQ ID NO: 2084 - DNA, 747 bp, Artificial Sequence
  source: /note="Description of Artificial Sequence: Synthetic polynucleotide"
caagtgcaactcgtccagtccggtgcagaagtcaagaaaccaggcgcatccgtgaaagtctcctgcaaagcctccggctacacattcactaactattggatgcattgggtgcgccaggccccgggacaggggctggagtggatggggttcattacccctaccaccggctaccctgagtacaaccagaagttcaaggatagggtcaccatgaccgctgacaagtccacctccaccgcgtacatggaactgtcatcgctccggtccgaggataccgcggtgtactactgcgcccggagaaaagtcggaaagggagtgtattacgccttggactactggggacaggggactaccgtgaccgtgtcgagcggtggaggcggctccggcggaggaggaagcgggggaggcggttcagggggcggaggaagcgacatccagatgacccagtccccgtcaagccttagcgcctccgtgggcgaccgcgtgaccattacttgtcgggcgtcgggaaacatccacaactacctcgcctggtaccagcagaagccgggaaaggtccccaagctgctgatctacaataccaagactctggccgacggagtgccttcccgcttttccggttcgggaagcgggactgactacaccctgactatctcctcgctgcaacccgaagatgtggctacgtactactgccagcacttctggtcctctccctggaccttcggcggtggcactaaggtcgagattaag

SEQ ID NO: 2085 - protein, 493 aa, Artificial Sequence
  source: /note="Description of Artificial Sequence: Synthetic polypeptide"
MALPVTALLLPLALLLHAARPQVQLVQSGAEVKKPGASVKVSCKASGYTFTNYWMHWVRQAPGQGLEWMGFITPTTGYPEYNQKFKDRVTMTADKSTSTAYMELSSLRSEDTAVYYCARRKVGKGVYYALDYWGQGTTVTVSSGGGGSGGGGSGGGGSGGGGSDIQMTQSPSSLSASVGDRVTITCRASGNIHNYLAWYQQKPGKVPKLLIYNTKTLADGVPSRFSGSGSGTDYTLTISSLQPEDVATYYCQHFWSSPWTFGGGTKVEIKTTTPAPRPPTPAPTIASQPLSLRPEACRPAAGGAVHTRGLDFACDIYIWAPLAGTCGVLLLSLVITLYCKRGRKKLLYIFKQPFMRPVQTTQEEDGCSCRFPEEEEGGCELRVKFSRSADAPAYQQGQNQLYNELNLGRREEYDVLDKRRGRDPEMGGKPRRKNPQEGLYNELQKDKMAEAYSEIGMKGERRRGKGHDGLYQGLSTATKDTYDALHMQALPPR

SEQ ID NO: 2086 - DNA, 1479 bp, Artificial Sequence
  source: /note="Description of Artificial Sequence: Synthetic polynucleotide"
atggccctccctgtcaccgccctgctgcttccgctggctcttctgctccacgccgctcggccccaagtgcaactcgtccagtccggtgcagaagtcaagaaaccaggcgcatccgtgaaagtctcctgcaaagcctccggctacacattcactaactattggatgcattgggtgcgccaggccccgggacaggggctggagtggatggggttcattacccctaccaccggctaccctgagtacaaccagaagttcaaggatagggtcaccatgaccgctgacaagtccacctccaccgcgtacatggaactgtcatcgctccggtccgaggataccgcggtgtactactgcgcccggagaaaagtcggaaagggagtgtattacgccttggactactggggacaggggactaccgtgaccgtgtcgagcggtggaggcggctccggcggaggaggaagcgggggaggcggttcagggggcggaggaagcgacatccagatgacccagtccccgtcaagccttagcgcctccgtgggcgaccgcgtgaccattacttgtcgggcgtcgggaaacatccacaactacctcgcctggtaccagcagaagccgggaaaggtccccaagctgctgatctacaataccaagactctggccgacggagtgccttcccgcttttccggttcgggaagcgggactgactacaccctgactatctcctcgctgcaacccgaagatgtggctacgtactactgccagcacttctggtcctctccctggaccttcggcggtggcactaaggtcgagattaagaccactaccccagcaccgaggccacccaccccggctcctaccatcgcctcccagcctctgtccctgcgtccggaggcatgtagacccgcagctggtggggccgtgcatacccggggtcttgacttcgcctgcgatatctacatttgggcccctctggctggtacttgcggggtcctgctgctttcactcgtgatcactctttactgtaagcgcggtcggaagaagctgctgtacatctttaagcaacccttcatgaggcctgtgcagactactcaagaggaggacggctgttcatgccggttcccagaggaggaggaaggcggctgcgaactgcgcgtgaaattcagccgcagcgcagatgctccagcctaccagcaggggcagaaccagctctacaacgaactcaatcttggtcggagagaggagtacgacgtgctggacaagcggagaggacgggacccagaaatgggcgggaagccgcgcagaaagaatccccaagagggcctgtacaacgagctccaaaaggataagatggcagaagcctatagcgagattggtatgaaaggggaacgcagaagaggcaaaggccacgacggactgtaccagggactcagcaccgccaccaaggacacctatgacgctcttcacatgcaggccctgccgcctcgg

SEQ ID NO: 2087 - protein, 122 aa, Artificial Sequence
  source: /note="Description of Artificial Sequence: Synthetic polypeptide"
QVQLVQSGAEVKKPGSSVKVSCKASGYTFTNYWMHWVRQAPGQGLEWMGFITPTTGYPEYNQKFKDRVTITADKSTSTAYMELSSLRSEDTAVYYCARRKVGKGVYYALDYWGQGTTVTVSS

SEQ ID NO: 2088 - DNA, 366 bp, Artificial Sequence
  source: /note="Description of Artificial Sequence: Synthetic polynucleotide"
caagtccaactcgtccaatcaggagcagaagtcaagaagcccggaagctctgtcaaagtgtcctgcaaggcctccggttacaccttcaccaactattggatgcactgggtcagacaggccccgggacagggcttggaatggatgggtttcatcactccaaccaccggttacccggagtacaaccagaagtttaaggaccgcgtgaccattactgccgacaagtccacgagcaccgcttacatggaacttagcagcctgcggtccgaggacactgccgtgtattactgcgcgcggaggaaggtcggaaagggagtgtactacgcactggactactggggccagggaaccaccgtgactgtgtcctcc

SEQ ID NO: 2089 - DNA, 321 bp, Artificial Sequence
  source: /note="Description of Artificial Sequence: Synthetic polynucleotide"
gatattcagatgacccagtccccttcatccctgagcgcctcagtgggcgatagagtgaccatcacttgtcgcgcctcgggcaatatccacaactacctcgcctggtaccagcagaagccgggaaaagtgcctaagctgctgatctacaacactaagaccctggcggatggagtgcccagccggttctccggctccggcagcggcacagactacaccctcaccatctcctcgctgcaaccagaggacgtggctacctactactgccagcatttctggtcgtccccctggactttcggaggggggaccaaagtggagattaag

SEQ ID NO: 2090 - protein, 249 aa, Artificial Sequence
  source: /note="Description of Artificial Sequence: Synthetic polypeptide"
QVQLVQSGAEVKKPGSSVKVSCKASGYTFTNYWMHWVRQAPGQGLEWMGFITPTTGYPEYNQKFKDRVTITADKSTSTAYMELSSLRSEDTAVYYCARRKVGKGVYYALDYWGQGTTVTVSSGGGGSGGGGSGGGGSGGGGSDIQMTQSPSSLSASVGDRVTITCRASGNIHNYLAWYQQKPGKVPKLLIYNTKTLADGVPSRFSGSGSGTDYTLTISSLQPEDVATYYCQHFWSSPWTFGGGTKVEIK

SEQ ID NO: 2091 - DNA, 747 bp, Artificial Sequence
  source: /note="Description of Artificial Sequence: Synthetic polynucleotide"
caagtccaactcgtccaatcaggagcagaagtcaagaagcccggaagctctgtcaaagtgtcctgcaaggcctccggttacaccttcaccaactattggatgcactgggtcagacaggccccgggacagggcttggaatggatgggtttcatcactccaaccaccggttacccggagtacaaccagaagtttaaggaccgcgtgaccattactgccgacaagtccacgagcaccgcttacatggaacttagcagcctgcggtccgaggacactgccgtgtattactgcgcgcggaggaaggtcggaaagggagtgtactacgcactggactactggggccagggaaccaccgtgactgtgtcctccggtggcggagggtcgggaggggggggctcgggaggaggagggtccgggggcggtggctcagatattcagatgacccagtccccttcatccctgagcgcctcagtgggcgatagagtgaccatcacttgtcgcgcctcgggcaatatccacaactacctcgcctggtaccagcagaagccgggaaaagtgcctaagctgctgatctacaacactaagaccctggcggatggagtgcccagccggttctccggctccggcagcggcacagactacaccctcaccatctcctcgctgcaaccagaggacgtggctacctactactgccagcatttctggtcgtccccctggactttcggaggggggaccaaagtggagattaag

SEQ ID NO: 2092 - protein, 493 aa, Artificial Sequence
  source: /note="Description of Artificial Sequence: Synthetic polypeptide"
MALPVTALLLPLALLLHAARPQVQLVQSGAEVKKPGSSVKVSCKASGYTFTNYWMHWVRQAPGQGLEWMGFITPTTGYPEYNQKFKDRVTITADKSTSTAYMELSSLRSEDTAVYYCARRKVGKGVYYALDYWGQGTTVTVSSGGGGSGGGGSGGGGSGGGGSDIQMTQSPSSLSASVGDRVTITCRASGNIHNYLAWYQQKPGKVPKLLIYNTKTLADGVPSRFSGSGSGTDYTLTISSLQPEDVATYYCQHFWSSPWTFGGGTKVEIKTTTPAPRPPTPAPTIASQPLSLRPEACRPAAGGAVHTRGLDFACDIYIWAPLAGTCGVLLLSLVITLYCKRGRKKLLYIFKQPFMRPVQTTQEEDGCSCRFPEEEEGGCELRVKFSRSADAPAYQQGQNQLYNELNLGRREEYDVLDKRRGRDPEMGGKPRRKNPQEGLYNELQKDKMAEAYSEIGMKGERRRGKGHDGLYQGLSTATKDTYDALHMQALPPR

SEQ ID NO: 2093 - DNA, 1479 bp, Artificial Sequence
  source: /note="Description of Artificial Sequence: Synthetic polynucleotide"
atggccctccctgtcaccgccctgctgcttccgctggctcttctgctccacgccgctcggccccaagtccaactcgtccaatcaggagcagaagtcaagaagcccggaagctctgtcaaagtgtcctgcaaggcctccggttacaccttcaccaactattggatgcactgggtcagacaggccccgggacagggcttggaatggatgggtttcatcactccaaccaccggttacccggagtacaaccagaagtttaaggaccgcgtgaccattactgccgacaagtccacgagcaccgcttacatggaacttagcagcctgcggtccgaggacactgccgtgtattactgcgcgcggaggaaggtcggaaagggagtgtactacgcactggactactggggccagggaaccaccgtgactgtgtcctccggtggcggagggtcgggaggggggggctcgggaggaggagggtccgggggcggtggctcagatattcagatgacccagtccccttcatccctgagcgcctcagtgggcgatagagtgaccatcacttgtcgcgcctcgggcaatatccacaactacctcgcctggtaccagcagaagccgggaaaagtgcctaagctgctgatctacaacactaagaccctggcggatggagtgcccagccggttctccggctccggcagcggcacagactacaccctcaccatctcctcgctgcaaccagaggacgtggctacctactactgccagcatttctggtcgtccccctggactttcggaggggggaccaaagtggagattaagaccactaccccagcaccgaggccacccaccccggctcctaccatcgcctcccagcctctgtccctgcgtccggaggcatgtagacccgcagctggtggggccgtgcatacccggggtcttgacttcgcctgcgatatctacatttgggcccctctggctggtacttgcggggtcctgctgctttcactcgtgatcactctttactgtaagcgcggtcggaagaagctgctgtacatctttaagcaacccttcatgaggcctgtgcagactactcaagaggaggacggctgttcatgccggttcccagaggaggaggaaggcggctgcgaactgcgcgtgaaattcagccgcagcgcagatgctccagcctaccagcaggggcagaaccagctctacaacgaactcaatcttggtcggagagaggagtacgacgtgctggacaagcggagaggacgggacccagaaatgggcgggaagccgcgcagaaagaatccccaagagggcctgtacaacgagctccaaaaggataagatggcagaagcctatagcgagattggtatgaaaggggaacgcagaagaggcaaaggccacgacggactgtaccagggactcagcaccgccaccaaggacacctatgacgctcttcacatgcaggccctgccgcctcgg

SEQ ID NO: 2094 - DNA, 366 bp, Artificial Sequence
  source: /note="Description of Artificial Sequence: Synthetic polynucleotide"
caagtccaactcgtccagtccggtgcagaagtcaagaaacccggagcttccgtgaaagtgtcctgcaaagcctccggttacacctttacgaactactggatgcattgggtgcgccaggccccgggacaggggctggaatggatgggcttcattacccccaccaccggataccccgagtacaatcagaagttcaaggaccgggtcaccatgaccgccgacaagtcaacctctactgcttacatggagctgtccagcctgcggtcggaagataccgccgtgtattactgcgcgagaaggaaagtcggaaagggagtgtactatgccctggactactggggacaggggaccactgtgactgtgtcaagc

SEQ ID NO: 2095 - protein, 107 aa, Artificial Sequence
  source: /note="Description of Artificial Sequence: Synthetic polypeptide"
AIRMTQSPFSLSASVGDRVTITCRASGNIHNYLAWYQQKPAKAPKLFIYNTKTLADGVPSRFSGSGSGTDYTLTISSLQPEDFATYYCQHFWSSPWTFGGGTKVEIK

SEQ ID NO: 2096 - DNA, 321 bp, Artificial Sequence
  source: /note="Description of Artificial Sequence: Synthetic polynucleotide"
gcgatccgcatgacccagagcccgttctccctgtccgcgtccgtgggggaccgcgtgactatcacgtgtcgggcctccgggaacatccacaactacctcgcatggtaccagcagaagccggccaaggcccctaagttgttcatctacaacaccaagactcttgccgacggagtgccgtcccggtttagcggaagcggttccggcaccgactacaccctgactatctcgagcctgcaaccagaagatttcgccacttactactgccagcacttctggtcgtccccttggacattcggcggcggcaccaaggtcgagattaag

SEQ ID NO: 2097 - protein, 249 aa, Artificial Sequence
  source: /note="Description of Artificial Sequence: Synthetic polypeptide"
QVQLVQSGAEVKKPGASVKVSCKASGYTFTNYWMHWVRQAPGQGLEWMGFITPTTGYPEYNQKFKDRVTMTADKSTSTAYMELSSLRSEDTAVYYCARRKVGKGVYYALDYWGQGTTVTVSSGGGGSGGGGSGGGGSGGGGSAIRMTQSPFSLSASVGDRVTITCRASGNIHNYLAWYQQKPAKAPKLFIYNTKTLADGVPSRFSGSGSGTDYTLTISSLQPEDFATYYCQHFWSSPWTFGGGTKVEIK

SEQ ID NO: 2098 - DNA, 747 bp, Artificial Sequence
  source: /note="Description of Artificial Sequence: Synthetic polynucleotide"
caagtccaactcgtccagtccggtgcagaagtcaagaaacccggagcttccgtgaaagtgtcctgcaaagcctccggttacacctttacgaactactggatgcattgggtgcgccaggccccgggacaggggctggaatggatgggcttcattacccccaccaccggataccccgagtacaatcagaagttcaaggaccgggtcaccatgaccgccgacaagtcaacctctactgcttacatggagctgtccagcctgcggtcggaagataccgccgtgtattactgcgcgagaaggaaagtcggaaagggagtgtactatgccctggactactggggacaggggaccactgtgactgtgtcaagcggaggcggaggctcggggggcggaggttcgggcggaggaggatcagggggcggcggttccgcgatccgcatgacccagagcccgttctccctgtccgcgtccgtgggggaccgcgtgactatcacgtgtcgggcctccgggaacatccacaactacctcgcatggtaccagcagaagccggccaaggcccctaagttgttcatctacaacaccaagactcttgccgacggagtgccgtcccggtttagcggaagcggttccggcaccgactacaccctgactatctcgagcctgcaaccagaagatttcgccacttactactgccagcacttctggtcgtccccttggacattcggcggcggcaccaaggtcgagattaag

SEQ ID NO: 2099 - protein, 493 aa, Artificial Sequence
  source: /note="Description of Artificial Sequence: Synthetic polypeptide"
MALPVTALLLPLALLLHAARPQVQLVQSGAEVKKPGASVKVSCKASGYTFTNYWMHWVRQAPGQGLEWMGFITPTTGYPEYNQKFKDRVTMTADKSTSTAYMELSSLRSEDTAVYYCARRKVGKGVYYALDYWGQGTTVTVSSGGGGSGGGGSGGGGSGGGGSAIRMTQSPFSLSASVGDRVTITCRASGNIHNYLAWYQQKPAKAPKLFIYNTKTLADGVPSRFSGSGSGTDYTLTISSLQPEDFATYYCQHFWSSPWTFGGGTKVEIKTTTPAPRPPTPAPTIASQPLSLRPEACRPAAGGAVHTRGLDFACDIYIWAPLAGTCGVLLLSLVITLYCKRGRKKLLYIFKQPFMRPVQTTQEEDGCSCRFPEEEEGGCELRVKFSRSADAPAYQQGQNQLYNELNLGRREEYDVLDKRRGRDPEMGGKPRRKNPQEGLYNELQKDKMAEAYSEIGMKGERRRGKGHDGLYQGLSTATKDTYDALHMQALPPR

SEQ ID NO: 2100 - DNA, 1479 bp, Artificial Sequence
  source: /note="Description of Artificial Sequence: Synthetic polynucleotide"
atggccctccctgtcaccgccctgctgcttccgctggctcttctgctccacgccgctcggccccaagtccaactcgtccagtccggtgcagaagtcaagaaacccggagcttccgtgaaagtgtcctgcaaagcctccggttacacctttacgaactactggatgcattgggtgcgccaggccccgggacaggggctggaatggatgggcttcattacccccaccaccggataccccgagtacaatcagaagttcaaggaccgggtcaccatgaccgccgacaagtcaacctctactgcttacatggagctgtccagcctgcggtcggaagataccgccgtgtattactgcgcgagaaggaaagtcggaaagggagtgtactatgccctggactactggggacaggggaccactgtgactgtgtcaagcggaggcggaggctcggggggcggaggttcgggcggaggaggatcagggggcggcggttccgcgatccgcatgacccagagcccgttctccctgtccgcgtccgtgggggaccgcgtgactatcacgtgtcgggcctccgggaacatccacaactacctcgcatggtaccagcagaagccggccaaggcccctaagttgttcatctacaacaccaagactcttgccgacggagtgccgtcccggtttagcggaagcggttccggcaccgactacaccctgactatctcgagcctgcaaccagaagatttcgccacttactactgccagcacttctggtcgtccccttggacattcggcggcggcaccaaggtcgagattaagaccactaccccagcaccgaggccacccaccccggctcctaccatcgcctcccagcctctgtccctgcgtccggaggcatgtagacccgcagctggtggggccgtgcatacccggggtcttgacttcgcctgcgatatctacatttgggcccctctggctggtacttgcggggtcctgctgctttcactcgtgatcactctttactgtaagcgcggtcggaagaagctgctgtacatctttaagcaacccttcatgaggcctgtgcagactactcaagaggaggacggctgttcatgccggttcccagaggaggaggaaggcggctgcgaactgcgcgtgaaattcagccgcagcgcagatgctccagcctaccagcaggggcagaaccagctctacaacgaactcaatcttggtcggagagaggagtacgacgtgctggacaagcggagaggacgggacccagaaatgggcgggaagccgcgcagaaagaatccccaagagggcctgtacaacgagctccaaaaggataagatggcagaagcctatagcgagattggtatgaaaggggaacgcagaagaggcaaaggccacgacggactgtaccagggactcagcaccgccaccaaggacacctatgacgctcttcacatgcaggccctgccgcctcgg

SEQ ID NO: 2101 - DNA, 366 bp, Artificial Sequence
  source: /note="Description of Artificial Sequence: Synthetic polynucleotide"
caagtccaactcgtccaaagcggtgcagaagtcaagaagcccggttcctccgtgaaagtgtcctgcaaagcctcgggctacaccttcactaattactggatgcattgggtccgccaggcgcccggacagggattggaatggatggggttcatcacgccgaccaccggatacccggagtacaaccagaagttcaaggacagagtgaccattaccgccgataagtccacctccaccgcttacatggagctctcctcactgcggtccgaagatacagccgtgtactattgtgctcgccggaaagtcggaaagggagtgtactacgccctggactattggggccagggcaccaccgtgaccgtgtcctcg

SEQ ID NO: 2102 - DNA, 321 bp, Artificial Sequence
  source: /note="Description of Artificial Sequence: Synthetic polynucleotide"
gccattaggatgactcagtcccctttctccctctccgcgagcgtgggcgaccgcgtgacgatcacttgccgggcctcggggaacattcacaactacctggcctggtaccagcagaagccggccaaggcccctaagctgttcatctacaacaccaagacccttgcggacggagtgccatcgagattttccggctcgggctctgggaccgattacactctgactatctcaagcctgcaacctgaggacttcgccacttactactgccagcacttctggagcagcccctggactttcggtggcgggaccaaggtcgaaatcaag

SEQ ID NO: 2103 - protein, 249 aa, Artificial Sequence
  source: /note="Description of Artificial Sequence: Synthetic polypeptide"
QVQLVQSGAEVKKPGSSVKVSCKASGYTFTNYWMHWVRQAPGQGLEWMGFITPTTGYPEYNQKFKDRVTITADKSTSTAYMELSSLRSEDTAVYYCARRKVGKGVYYALDYWGQGTTVTVSSGGGGSGGGGSGGGGSGGGGSAIRMTQSPFSLSASVGDRVTITCRASGNIHNYLAWYQQKPAKAPKLFIYNTKTLADGVPSRFSGSGSGTDYTLTISSLQPEDFATYYCQHFWSSPWTFGGGTKVEIK

SEQ ID NO: 2104 - DNA, 747 bp, Artificial Sequence
  source: /note="Description of Artificial Sequence: Synthetic polynucleotide"
caagtccaactcgtccaaagcggtgcagaagtcaagaagcccggttcctccgtgaaagtgtcctgcaaagcctcgggctacaccttcactaattactggatgcattgggtccgccaggcgcccggacagggattggaatggatggggttcatcacgccgaccaccggatacccggagtacaaccagaagttcaaggacagagtgaccattaccgccgataagtccacctccaccgcttacatggagctctcctcactgcggtccgaagatacagccgtgtactattgtgctcgccggaaagtcggaaagggagtgtactacgccctggactattggggccagggcaccaccgtgaccgtgtcctcgggaggagggggttcgggcggaggcggctccggtggaggcggaagcggagggggcggatcagccattaggatgactcagtcccctttctccctctccgcgagcgtgggcgaccgcgtgacgatcacttgccgggcctcggggaacattcacaactacctggcctggtaccagcagaagccggccaaggcccctaagctgttcatctacaacaccaagacccttgcggacggagtgccatcgagattttccggctcgggctctgggaccgattacactctgactatctcaagcctgcaacctgaggacttcgccacttactactgccagcacttctggagcagcccctggactttcggtggcgggaccaaggtcgaaatcaag

SEQ ID NO: 2105 - protein, 493 aa, Artificial Sequence
  source: /note="Description of Artificial Sequence: Synthetic polypeptide"
MALPVTALLLPLALLLHAARPQVQLVQSGAEVKKPGSSVKVSCKASGYTFTNYWMHWVRQAPGQGLEWMGFITPTTGYPEYNQKFKDRVTITADKSTSTAYMELSSLRSEDTAVYYCARRKVGKGVYYALDYWGQGTTVTVSSGGGGSGGGGSGGGGSGGGGSAIRMTQSPFSLSASVGDRVTITCRASGNIHNYLAWYQQKPAKAPKLFIYNTKTLADGVPSRFSGSGSGTDYTLTISSLQPEDFATYYCQHFWSSPWTFGGGTKVEIKTTTPAPRPPTPAPTIASQPLSLRPEACRPAAGGAVHTRGLDFACDIYIWAPLAGTCGVLLLSLVITLYCKRGRKKLLYIFKQPFMRPVQTTQEEDGCSCRFPEEEEGGCELRVKFSRSADAPAYQQGQNQLYNELNLGRREEYDVLDKRRGRDPEMGGKPRRKNPQEGLYNELQKDKMAEAYSEIGMKGERRRGKGHDGLYQGLSTATKDTYDALHMQALPPR

SEQ ID NO: 2106 - DNA, 1479 bp, Artificial Sequence
  source: /note="Description of Artificial Sequence: Synthetic polynucleotide"
atggccctccctgtcaccgccctgctgcttccgctggctcttctgctccacgccgctcggccccaagtccaactcgtccaaagcggtgcagaagtcaagaagcccggttcctccgtgaaagtgtcctgcaaagcctcgggctacaccttcactaattactggatgcattgggtccgccaggcgcccggacagggattggaatggatggggttcatcacgccgaccaccggatacccggagtacaaccagaagttcaaggacagagtgaccattaccgccgataagtccacctccaccgcttacatggagctctcctcactgcggtccgaagatacagccgtgtactattgtgctcgccggaaagtcggaaagggagtgtactacgccctggactattggggccagggcaccaccgtgaccgtgtcctcgggaggagggggttcgggcggaggcggctccggtggaggcggaagcggagggggcggatcagccattaggatgactcagtcccctttctccctctccgcgagcgtgggcgaccgcgtgacgatcacttgccgggcctcggggaacattcacaactacctggcctggtaccagcagaagccggccaaggcccctaagctgttcatctacaacaccaagacccttgcggacggagtgccatcgagattttccggctcgggctctgggaccgattacactctgactatctcaagcctgcaacctgaggacttcgccacttactactgccagcacttctggagcagcccctggactttcggtggcgggaccaaggtcgaaatcaagaccactaccccagcaccgaggccacccaccccggctcctaccatcgcctcccagcctctgtccctgcgtccggaggcatgtagacccgcagctggtggggccgtgcatacccggggtcttgacttcgcctgcgatatctacatttgggcccctctggctggtacttgcggggtcctgctgctttcactcgtgatcactctttactgtaagcgcggtcggaagaagctgctgtacatctttaagcaacccttcatgaggcctgtgcagactactcaagaggaggacggctgttcatgccggttcccagaggaggaggaaggcggctgcgaactgcgcgtgaaattcagccgcagcgcagatgctccagcctaccagcaggggcagaaccagctctacaacgaactcaatcttggtcggagagaggagtacgacgtgctggacaagcggagaggacgggacccagaaatgggcgggaagccgcgcagaaagaatccccaagagggcctgtacaacgagctccaaaaggataagatggcagaagcctatagcgagattggtatgaaaggggaacgcagaagaggcaaaggccacgacggactgtaccagggactcagcaccgccaccaaggacacctatgacgctcttcacatgcaggccctgccgcctcgg

SEQ ID NO: 2107 - DNA, 366 bp, Artificial Sequence
  source: /note="Description of Artificial Sequence: Synthetic polynucleotide"
caagtccaactcgtccaatccggtgcagaagtcaagaaacccggtgcatccgtgaaagtgtcatgcaaagcctccgggtacaccttcactaactacaacctccactgggtccgccaggccccgggacagggactggagtggatgggggccatctacccgggaaactacgacacttcatacaaccagaagttcaagggcagagtgaccatgactgccgacaagagcacatcgaccgcctacatggaactcagctccctgcgctccgaggatactgccgtctactactgtgcccgggtggacttcggccactcccggtattggtatttcgatgtctggggacagggaaccaccgtgactgtgtccagc

SEQ ID NO: 2108 - protein, 106 aa, Artificial Sequence
  source: /note="Description of Artificial Sequence: Synthetic polypeptide"
EIVLTQSPATLSLSPGERATLSCRATSSVSSMNWYQQKPGQAPRPLIHATSNLASGIPARFSGSGSGTDYTLTISSLEPEDAAVYYCQQWTFNPPTFGQGTKLEIK

SEQ ID NO: 2109 - DNA, 318 bp, Artificial Sequence
  source: /note="Description of Artificial Sequence: Synthetic polynucleotide"
gaaatcgtgctgacccagtcccctgcgactctgagcctgagccctggggaacgcgccactttgtcatgccgggccacctcctccgtgtcctccatgaactggtaccagcagaagcccggacaggctccgcggccgctgatccatgccacctccaacctggccagcggcattcccgcgaggttttccggctcgggctctggtaccgactacaccctgaccatctcgagccttgagccagaagatgctgcggtgtactactgccaacagtggaccttcaatccgcctacgttcggacaggggaccaagctggagattaag

SEQ ID NO: 2110 - protein, 248 aa, Artificial Sequence
  source: /note="Description of Artificial Sequence: Synthetic polypeptide"
QVQLVQSGAEVKKPGASVKVSCKASGYTFTNYNLHWVRQAPGQGLEWMGAIYPGNYDTSYNQKFKGRVTMTADKSTSTAYMELSSLRSEDTAVYYCARVDFGHSRYWYFDVWGQGTTVTVSSGGGGSGGGGSGGGGSGGGGSEIVLTQSPATLSLSPGERATLSCRATSSVSSMNWYQQKPGQAPRPLIHATSNLASGIPARFSGSGSGTDYTLTISSLEPEDAAVYYCQQWTFNPPTFGQGTKLEIK

SEQ ID NO: 2111 - DNA, 744 bp, Artificial Sequence
  source: /note="Description of Artificial Sequence: Synthetic polynucleotide"
caagtccaactcgtccaatccggtgcagaagtcaagaaacccggtgcatccgtgaaagtgtcatgcaaagcctccgggtacaccttcactaactacaacctccactgggtccgccaggccccgggacagggactggagtggatgggggccatctacccgggaaactacgacacttcatacaaccagaagttcaagggcagagtgaccatgactgccgacaagagcacatcgaccgcctacatggaactcagctccctgcgctccgaggatactgccgtctactactgtgcccgggtggacttcggccactcccggtattggtatttcgatgtctggggacagggaaccaccgtgactgtgtccagcgggggcggaggatcgggtggcggaggttcggggggaggaggatcaggcggcggcggatcggaaatcgtgctgacccagtcccctgcgactctgagcctgagccctggggaacgcgccactttgtcatgccgggccacctcctccgtgtcctccatgaactggtaccagcagaagcccggacaggctccgcggccgctgatccatgccacctccaacctggccagcggcattcccgcgaggttttccggctcgggctctggtaccgactacaccctgaccatctcgagccttgagccagaagatgctgcggtgtactactgccaacagtggaccttcaatccgcctacgttcggacaggggaccaagctggagattaag

SEQ ID NO: 2112 - protein, 492 aa, Artificial Sequence
  source: /note="Description of Artificial Sequence: Synthetic polypeptide"
MALPVTALLLPLALLLHAARPQVQLVQSGAEVKKPGASVKVSCKASGYTFTNYNLHWVRQAPGQGLEWMGAIYPGNYDTSYNQKFKGRVTMTADKSTSTAYMELSSLRSEDTAVYYCARVDFGHSRYWYFDVWGQGTTVTVSSGGGGSGGGGSGGGGSGGGGSEIVLTQSPATLSLSPGERATLSCRATSSVSSMNWYQQKPGQAPRPLIHATSNLASGIPARFSGSGSGTDYTLTISSLEPEDAAVYYCQQWTFNPPTFGQGTKLEIKTTTPAPRPPTPAPTIASQPLSLRPEACRPAAGGAVHTRGLDFACDIYIWAPLAGTCGVLLLSLVITLYCKRGRKKLLYIFKQPFMRPVQTTQEEDGCSCRFPEEEEGGCELRVKFSRSADAPAYQQGQNQLYNELNLGRREEYDVLDKRRGRDPEMGGKPRRKNPQEGLYNELQKDKMAEAYSEIGMKGERRRGKGHDGLYQGLSTATKDTYDALHMQALPPR

SEQ ID NO: 2113 - DNA, 1476 bp, Artificial Sequence
  source: /note="Description of Artificial Sequence: Synthetic polynucleotide"
atggccctccctgtcaccgccctgctgcttccgctggctcttctgctccacgccgctcggccccaagtccaactcgtccaatccggtgcagaagtcaagaaacccggtgcatccgtgaaagtgtcatgcaaagcctccgggtacaccttcactaactacaacctccactgggtccgccaggccccgggacagggactggagtggatgggggccatctacccgggaaactacgacacttcatacaaccagaagttcaagggcagagtgaccatgactgccgacaagagcacatcgaccgcctacatggaactcagctccctgcgctccgaggatactgccgtctactactgtgcccgggtggacttcggccactcccggtattggtatttcgatgtctggggacagggaaccaccgtgactgtgtccagcgggggcggaggatcgggtggcggaggttcggggggaggaggatcaggcggcggcggatcggaaatcgtgctgacccagtcccctgcgactctgagcctgagccctggggaacgcgccactttgtcatgccgggccacctcctccgtgtcctccatgaactggtaccagcagaagcccggacaggctccgcggccgctgatccatgccacctccaacctggccagcggcattcccgcgaggttttccggctcgggctctggtaccgactacaccctgaccatctcgagccttgagccagaagatgctgcggtgtactactgccaacagtggaccttcaatccgcctacgttcggacaggggaccaagctggagattaagaccactaccccagcaccgaggccacccaccccggctcctaccatcgcctcccagcctctgtccctgcgtccggaggcatgtagacccgcagctggtggggccgtgcatacccggggtcttgacttcgcctgcgatatctacatttgggcccctctggctggtacttgcggggtcctgctgctttcactcgtgatcactctttactgtaagcgcggtcggaagaagctgctgtacatctttaagcaacccttcatgaggcctgtgcagactactcaagaggaggacggctgttcatgccggttcccagaggaggaggaaggcggctgcgaactgcgcgtgaaattcagccgcagcgcagatgctccagcctaccagcaggggcagaaccagctctacaacgaactcaatcttggtcggagagaggagtacgacgtgctggacaagcggagaggacgggacccagaaatgggcgggaagccgcgcagaaagaatccccaagagggcctgtacaacgagctccaaaaggataagatggcagaagcctatagcgagattggtatgaaaggggaacgcagaagaggcaaaggccacgacggactgtaccagggactcagcaccgccaccaaggacacctatgacgctcttcacatgcaggccctgccgcctcgg

SEQ ID NO: 2114 - DNA, 366 bp, Artificial Sequence
  source: /note="Description of Artificial Sequence: Synthetic polynucleotide"
caagtccaactcgtccagtcgggagcagaagtcaagaagcccggatcatccgtgaaagtgtcctgcaaagcctcaggctacacctttaccaactacaacttgcactgggtcagacaggccccgggacagggcctggagtggatgggcgccatctaccccggaaactatgacacctcgtacaaccagaagttcaagggtcgcgtgactatcacggctgacaagtccactagcaccgcgtacatggaactttcctcactgcggtccgaggatactgcggtgtactactgcgcccgggtggacttcggacactcgagatattggtacttcgatgtctggggacaggggaccaccgtgactgtgtcctcc

SEQ ID NO: 2115 - DNA, 318 bp, Artificial Sequence
  source: /note="Description of Artificial Sequence: Synthetic polynucleotide"
gaaattgtgctgacccagtctcccgcaaccctgtccctgagccctggagagcgcgccaccctgtcctgccgggccacatcctccgtgtcgtccatgaactggtaccagcagaagcccggccaagccccgaggcctctgattcatgctacctcaaatctggccagcggaatcccggcgcgcttctccggctcgggcagcggtactgactacactctcaccatctcgtccctcgaaccggaggacgccgccgtctactactgtcagcagtggaccttcaacccacctactttcggacaagggaccaagctggagatcaag

SEQ ID NO: 2116 - protein, 19 aa, Artificial Sequence
  source: /note="Description of Artificial Sequence: Synthetic peptide"
GGGSGGGGSGGGGSGGGGS

SEQ ID NO: 2117 - DNA, 744 bp, Artificial Sequence
  source: /note="Description of Artificial Sequence: Synthetic polynucleotide"
caagtccaactcgtccagtcgggagcagaagtcaagaagcccggatcatccgtgaaagtgtcctgcaaagcctcaggctacacctttaccaactacaacttgcactgggtcagacaggccccgggacagggcctggagtggatgggcgccatctaccccggaaactatgacacctcgtacaaccagaagttcaagggtcgcgtgactatcacggctgacaagtccactagcaccgcgtacatggaactttcctcactgcggtccgaggatactgcggtgtactactgcgcccgggtggacttcggacactcgagatattggtacttcgatgtctggggacaggggaccaccgtgactgtgtcctccgggggcggtggcagcgggggaggcggaagcggcggagggggttccgggggtggaggaagcgaaattgtgctgacccagtctcccgcaaccctgtccctgagccctggagagcgcgccaccctgtcctgccgggccacatcctccgtgtcgtccatgaactggtaccagcagaagcccggccaagccccgaggcctctgattcatgctacctcaaatctggccagcggaatcccggcgcgcttctccggctcgggcagcggtactgactacactctcaccatctcgtccctcgaaccggaggacgccgccgtctactactgtcagcagtggaccttcaacccacctactttcggacaagggaccaagctggagatcaag

SEQ ID NO: 2118 - protein, 492 aa, Artificial Sequence
  source: /note="Description of Artificial Sequence: Synthetic polypeptide"
MALPVTALLLPLALLLHAARPQVQLVQSGAEVKKPGSSVKVSCKASGYTFTNYNLHWVRQAPGQGLEWMGAIYPGNYDTSYNQKFKGRVTITADKSTSTAYMELSSLRSEDTAVYYCARVDFGHSRYWYFDVWGQGTTVTVSSGGGGSGGGGSGGGGSGGGGSEIVLTQSPATLSLSPGERATLSCRATSSVSSMNWYQQKPGQAPRPLIHATSNLASGIPARFSGSGSGTDYTLTISSLEPEDAAVYYCQQWTFNPPTFGQGTKLEIKTTTPAPRPPTPAPTIASQPLSLRPEACRPAAGGAVHTRGLDFACDIYIWAPLAGTCGVLLLSLVITLYCKRGRKKLLYIFKQPFMRPVQTTQEEDGCSCRFPEEEEGGCELRVKFSRSADAPAYQQGQNQLYNELNLGRREEYDVLDKRRGRDPEMGGKPRRKNPQEGLYNELQKDKMAEAYSEIGMKGERRRGKGHDGLYQGLSTATKDTYDALHMQALPPR

SEQ ID NO: 2119 - DNA, 1476 bp, Artificial Sequence
  source: /note="Description of Artificial Sequence: Synthetic polynucleotide"
atggccctccctgtcaccgccctgctgcttccgctggctcttctgctccacgccgctcggccccaagtccaactcgtccagtcgggagcagaagtcaagaagcccggatcatccgtgaaagtgtcctgcaaagcctcaggctacacctttaccaactacaacttgcactgggtcagacaggccccgggacagggcctggagtggatgggcgccatctaccccggaaactatgacacctcgtacaaccagaagttcaagggtcgcgtgactatcacggctgacaagtccactagcaccgcgtacatggaactttcctcactgcggtccgaggatactgcggtgtactactgcgcccgggtggacttcggacactcgagatattggtacttcgatgtctggggacaggggaccaccgtgactgtgtcctccgggggcggtggcagcgggggaggcggaagcggcggagggggttccgggggtggaggaagcgaaattgtgctgacccagtctcccgcaaccctgtccctgagccctggagagcgcgccaccctgtcctgccgggccacatcctccgtgtcgtccatgaactggtaccagcagaagcccggccaagccccgaggcctctgattcatgctacctcaaatctggccagcggaatcccggcgcgcttctccggctcgggcagcggtactgactacactctcaccatctcgtccctcgaaccggaggacgccgccgtctactactgtcagcagtggaccttcaacccacctactttcggacaagggaccaagctggagatcaagaccactaccccagcaccgaggccacccaccccggctcctaccatcgcctcccagcctctgtccctgcgtccggaggcatgtagacccgcagctggtggggccgtgcatacccggggtcttgacttcgcctgcgatatctacatttgggcccctctggctggtacttgcggggtcctgctgctttcactcgtgatcactctttactgtaagcgcggtcggaagaagctgctgtacatctttaagcaacccttcatgaggcctgtgcagactactcaagaggaggacggctgttcatgccggttcccagaggaggaggaaggcggctgcgaactgcgcgtgaaattcagccgcagcgcagatgctccagcctaccagcaggggcagaaccagctctacaacgaactcaatcttggtcggagagaggagtacgacgtgctggacaagcggagaggacgggacccagaaatgggcgggaagccgcgcagaaagaatccccaagagggcctgtacaacgagctccaaaaggataagatggcagaagcctatagcgagattggtatgaaaggggaacgcagaagaggcaaaggccacgacggactgtaccagggactcagcaccgccaccaaggacacctatgacgctcttcacatgcaggccctgccgcctcgg

SEQ ID NO: 2120 - protein, 122 aa, Artificial Sequence
  source: /note="Description of Artificial Sequence: Synthetic polypeptide"
QVQLVQSGAEVKKPGSSVKVSCKASGYTFTNYNLHWVRQAPGQGLEWMGAIYPGNYDTSYNQKFKGRVTITADKSTSTAYMELSSLRSEDTAVYYCARVDFGHSRYWYFDVWGQGTTVTVSS

SEQ ID NO: 2121 - protein, 248 aa, Artificial Sequence
  source: /note="Description of Artificial Sequence: Synthetic polypeptide"
QVQLVQSGAEVKKPGSSVKVSCKASGYTFTNYNLHWVRQAPGQGLEWMGAIYPGNYDTSYNQKFKGRVTITADKSTSTAYMELSSLRSEDTAVYYCARVDFGHSRYWYFDVWGQGTTVTVSSGGGGSGGGGSGGGGSGGGGSEIVLTQSPATLSLSPGERATLSCRATSSVSSMNWYQQKPGQAPRPLIHATSNLASGIPARFSGSGSGTDYTLTISSLEPEDAAVYYCQQWTFNPPTFGQGTKLEIK

SEQ ID NO: 2122 - DNA, 744 bp, Artificial Sequence
  source: /note="Description of Artificial Sequence: Synthetic polynucleotide"
caagtccaactcgtccaatccggcgcagaagtcaagaaaccaggatcgtccgtgaaagtgtcctgcaaggcgtccgggtacaccttcactaattacaacctccactgggtcagacaggccccaggacagggcctggaatggatgggcgccatctaccctggaaactacgatacctcgtacaaccagaagttcaagggccgcgtgactattaccgccgacaagagcacctccaccgcctatatggaactgtcgtccctgcggtccgaggacactgccgtgtactactgtgcaagggtggacttcggtcactcccggtattggtacttcgacgtctggggacaggggaccactgtgaccgtgtcgtcgggaggcggtggaagcggcggtggcggaagcggaggcggcggatcagggggcggaggaagcgacattcagcttacccagtcaccgtccttcctgagcgcctccgtgggagatcgcgtgaccatcacatgccgcgccacttcctcggtgtcctccatgaactggtaccagcagaagcccggaaaggctcctaagcctctgatccatgcgacctccaacttggcttccggggtgccgtcacggttcagcggcagcggttcaggaactgagtacaccctgactattagctctctccaacccgaggacttcgccacctactactgccagcagtggaccttcaacccgcccacgtttgggcagggtaccaagctggagatcaag

SEQ ID NO: 2123 - protein, 492 aa, Artificial Sequence
  source: /note="Description of Artificial Sequence: Synthetic polypeptide"
MALPVTALLLPLALLLHAARPQVQLVQSGAEVKKPGSSVKVSCKASGYTFTNYNLHWVRQAPGQGLEWMGAIYPGNYDTSYNQKFKGRVTITADKSTSTAYMELSSLRSEDTAVYYCARVDFGHSRYWYFDVWGQGTTVTVSSGGGGSGGGGSGGGGSGGGGSDIQLTQSPSFLSASVGDRVTITCRATSSVSSMNWYQQKPGKAPKPLIHATSNLASGVPSRFSGSGSGTEYTLTISSLQPEDFATYYCQQWTFNPPTFGQGTKLEIKTTTPAPRPPTPAPTIASQPLSLRPEACRPAAGGAVHTRGLDFACDIYIWAPLAGTCGVLLLSLVITLYCKRGRKKLLYIFKQPFMRPVQTTQEEDGCSCRFPEEEEGGCELRVKFSRSADAPAYQQGQNQLYNELNLGRREEYDVLDKRRGRDPEMGGKPRRKNPQEGLYNELQKDKMAEAYSEIGMKGERRRGKGHDGLYQGLSTATKDTYDALHMQALPPR

SEQ ID NO: 2124 - DNA, 1476 bp, Artificial Sequence
  source: /note="Description of Artificial Sequence: Synthetic polynucleotide"
atggccctccctgtcaccgccctgctgcttccgctggctcttctgctccacgccgctcggccccaagtccaactcgtccaatccggcgcagaagtcaagaaaccaggatcgtccgtgaaagtgtcctgcaaggcgtccgggtacaccttcactaattacaacctccactgggtcagacaggccccaggacagggcctggaatggatgggcgccatctaccctggaaactacgatacctcgtacaaccagaagttcaagggccgcgtgactattaccgccgacaagagcacctccaccgcctatatggaactgtcgtccctgcggtccgaggacactgccgtgtactactgtgcaagggtggacttcggtcactcccggtattggtacttcgacgtctggggacaggggaccactgtgaccgtgtcgtcgggaggcggtggaagcggcggtggcggaagcggaggcggcggatcagggggcggaggaagcgacattcagcttacccagtcaccgtccttcctgagcgcctccgtgggagatcgcgtgaccatcacatgccgcgccacttcctcggtgtcctccatgaactggtaccagcagaagcccggaaaggctcctaagcctctgatccatgcgacctccaacttggcttccggggtgccgtcacggttcagcggcagcggttcaggaactgagtacaccctgactattagctctctccaacccgaggacttcgccacctactactgccagcagtggaccttcaacccgcccacgtttgggcagggtaccaagctggagatcaagaccactaccccagcaccgaggccacccaccccggctcctaccatcgcctcccagcctctgtccctgcgtccggaggcatgtagacccgcagctggtggggccgtgcatacccggggtcttgacttcgcctgcgatatctacatttgggcccctctggctggtacttgcggggtcctgctgctttcactcgtgatcactctttactgtaagcgcggtcggaagaagctgctgtacatctttaagcaacccttcatgaggcctgtgcagactactcaagaggaggacggctgttcatgccggttcccagaggaggaggaaggcggctgcgaactgcgcgtgaaattcagccgcagcgcagatgctccagcctaccagcaggggcagaaccagctctacaacgaactcaatcttggtcggagagaggagtacgacgtgctggacaagcggagaggacgggacccagaaatgggcgggaagccgcgcagaaagaatccccaagagggcctgtacaacgagctccaaaaggataagatggcagaagcctatagcgagattggtatgaaaggggaacgcagaagaggcaaaggccacgacggactgtaccagggactcagcaccgccaccaaggacacctatgacgctcttcacatgcaggccctgccgcctcgg

SEQ ID NO: 2125 - DNA, 366 bp, Artificial Sequence
  source: /note="Description of Artificial Sequence: Synthetic polynucleotide"
caagtccaactcgtccagtcaggagcagaagtcaagaaacctggagcttccgtgaaagtgtcgtgcaaggcctccggctacaccttcacctcttacaacatgcactgggtcagacaggcccctggtcaaggactggaatggatgggagcgatctacccgggcaacggagacacttcgtacaaccccaagttcaagggacgggtcactatgaccgccgataagagcacgcgcaccgcgtacatggaactgagcagcctgcgctccgaggacactgccgtgtattactgcgcgaggagctacttctacggatcatcgtcgtggtacttcgacgtctggggccagggcaccaccgtgaccgtgtcatcc

SEQ ID NO: 2126 - protein, 106 aa, Artificial Sequence
  source: /note="Description of Artificial Sequence: Synthetic polypeptide"
DIQLTQSPSFLSASVGDRVTITCRASSSVSSMHWYQQKPGKAPKPLIFATSNLASGVPSRFSGSGSGTEYTLTISSLQPEDFATYYCQQWIFNPPTFGGGTKVEIK

SEQ ID NO: 2127 - DNA, 318 bp, Artificial Sequence
  source: /note="Description of Artificial Sequence: Synthetic polynucleotide"
gatattcagctgacccagagcccgtcattcctgtccgcctccgtgggagacagagtgaccatcacttgtcgggccagctcctcggtgtcctccatgcattggtatcagcagaagcctgggaaggctcccaagcccctcatcttcgccacatcaaatcttgcctccggggtgccaagccggttctccgggagcggctccggtactgagtacactctgaccatttcctccttgcaacccgaggactttgccacctactactgccagcagtggatctttaacccgccgaccttcggaggaggaaccaaagtggagatcaag

SEQ ID NO: 2128 - protein, 248 aa, Artificial Sequence
  source: /note="Description of Artificial Sequence: Synthetic polypeptide"
QVQLVQSGAEVKKPGASVKVSCKASGYTFTSYNMHWVRQAPGQGLEWMGAIYPGNGDTSYNPKFKGRVTMTADKSTRTAYMELSSLRSEDTAVYYCARSYFYGSSSWYFDVWGQGTTVTVSSGGGGSGGGGSGGGGSGGGGSDIQLTQSPSFLSASVGDRVTITCRASSSVSSMHWYQQKPGKAPKPLIFATSNLASGVPSRFSGSGSGTEYTLTISSLQPEDFATYYCQQWIFNPPTFGGGTKVEIK

SEQ ID NO: 2129 - DNA, 744 bp, Artificial Sequence
  source: /note="Description of Artificial Sequence: Synthetic polynucleotide"
caagtccaactcgtccagtcaggagcagaagtcaagaaacctggagcttccgtgaaagtgtcgtgcaaggcctccggctacaccttcacctcttacaacatgcactgggtcagacaggcccctggtcaaggactggaatggatgggagcgatctacccgggcaacggagacacttcgtacaaccccaagttcaagggacgggtcactatgaccgccgataagagcacgcgcaccgcgtacatggaactgagcagcctgcgctccgaggacactgccgtgtattactgcgcgaggagctacttctacggatcatcgtcgtggtacttcgacgtctggggccagggcaccaccgtgaccgtgtcatccggtggcggaggatcggggggcggaggaagcggcggggggggctccggcggtggaggctcggatattcagctgacccagagcccgtcattcctgtccgcctccgtgggagacagagtgaccatcacttgtcgggccagctcctcggtgtcctccatgcattggtatcagcagaagcctgggaaggctcccaagcccctcatcttcgccacatcaaatcttgcctccggggtgccaagccggttctccgggagcggctccggtactgagtacactctgaccatttcctccttgcaacccgaggactttgccacctactactgccagcagtggatctttaacccgccgaccttcggaggaggaaccaaagtggagatcaag

SEQ ID NO: 2130 - protein, 492 aa, Artificial Sequence
  source: /note="Description of Artificial Sequence: Synthetic polypeptide"
MALPVTALLLPLALLLHAARPQVQLVQSGAEVKKPGASVKVSCKASGYTFTSYNMHWVRQAPGQGLEWMGAIYPGNGDTSYNPKFKGRVTMTADKSTRTAYMELSSLRSEDTAVYYCARSYFYGSSSWYFDVWGQGTTVTVSSGGGGSGGGGSGGGGSGGGGSDIQLTQSPSFLSASVGDRVTITCRASSSVSSMHWYQQKPGKAPKPLIFATSNLASGVPSRFSGSGSGTEYTLTISSLQPEDFATYYCQQWIFNPPTFGGGTKVEIKTTTPAPRPPTPAPTIASQPLSLRPEACRPAAGGAVHTRGLDFACDIYIWAPLAGTCGVLLLSLVITLYCKRGRKKLLYIFKQPFMRPVQTTQEEDGCSCRFPEEEEGGCELRVKFSRSADAPAYQQGQNQLYNELNLGRREEYDVLDKRRGRDPEMGGKPRRKNPQEGLYNELQKDKMAEAYSEIGMKGERRRGKGHDGLYQGLSTATKDTYDALHMQALPPR

SEQ ID NO: 2131 - DNA, 1476 bp, Artificial Sequence
  source: /note="Description of Artificial Sequence: Synthetic polynucleotide"
atggccctccctgtcaccgccctgctgcttccgctggctcttctgctccacgccgctcggccccaagtccaactcgtccagtcaggagcagaagtcaagaaacctggagcttccgtgaaagtgtcgtgcaaggcctccggctacaccttcacctcttacaacatgcactgggtcagacaggcccctggtcaaggactggaatggatgggagcgatctacccgggcaacggagacacttcgtacaaccccaagttcaagggacgggtcactatgaccgccgataagagcacgcgcaccgcgtacatggaactgagcagcctgcgctccgaggacactgccgtgtattactgcgcgaggagctacttctacggatcatcgtcgtggtacttcgacgtctggggccagggcaccaccgtgaccgtgtcatccggtggcggaggatcggggggcggaggaagcggcggggggggctccggcggtggaggctcggatattcagctgacccagagcccgtcattcctgtccgcctccgtgggagacagagtgaccatcacttgtcgggccagctcctcggtgtcctccatgcattggtatcagcagaagcctgggaaggctcccaagcccctcatcttcgccacatcaaatcttgcctccggggtgccaagccggttctccgggagcggctccggtactgagtacactctgaccatttcctccttgcaacccgaggactttgccacctactactgccagcagtggatctttaacccgccgaccttcggaggaggaaccaaagtggagatcaagaccactaccccagcaccgaggccacccaccccggctcctaccatcgcctcccagcctctgtccctgcgtccggaggcatgtagacccgcagctggtggggccgtgcatacccggggtcttgacttcgcctgcgatatctacatttgggcccctctggctggtacttgcggggtcctgctgctttcactcgtgatcactctttactgtaagcgcggtcggaagaagctgctgtacatctttaagcaacccttcatgaggcctgtgcagactactcaagaggaggacggctgttcatgccggttcccagaggaggaggaaggcggctgcgaactgcgcgtgaaattcagccgcagcgcagatgctccagcctaccagcaggggcagaaccagctctacaacgaactcaatcttggtcggagagaggagtacgacgtgctggacaagcggagaggacgggacccagaaatgggcgggaagccgcgcagaaagaatccccaagagggcctgtacaacgagctccaaaaggataagatggcagaagcctatagcgagattggtatgaaaggggaacgcagaagaggcaaaggccacgacggactgtaccagggactcagcaccgccaccaaggacacctatgacgctcttcacatgcaggccctgccgcctcgg

SEQ ID NO: 2132 - protein, 122 aa, Artificial Sequence
  source: /note="Description of Artificial Sequence: Synthetic polypeptide"
QVQLVQSGAEVKKPGSSVKVSCKASGYTFTSYNMHWVRQAPGQGLEWMGAIYPGNGDTSYNPKFKGRVTITADKSTRTAYMELSSLRSEDTAVYYCARSYFYGSSSWYFDVWGQGTTVTVSS

SEQ ID NO: 2133 - DNA, 366 bp, Artificial Sequence
  source: /note="Description of Artificial Sequence: Synthetic polynucleotide"
caagtgcaactcgtccagtccggtgcagaagtcaagaagcctggttcatcggtgaaagtgtcctgcaaagcgtcgggctacaccttcacctcgtacaacatgcactgggtccgccaggcccccggacaaggactggaatggatgggtgctatctaccccggaaacggagataccagctacaaccccaagttcaagggacgcgtgaccattactgccgacaagtccacaagaaccgcctacatggaactgtccagcctgagatccgaggacactgcggtgtactactgtgcgaggtcctacttctacgggtcctcctcttggtacttcgacgtctggggacagggcactactgtgaccgtgtccagc

SEQ ID NO: 2134 - DNA, 318 bp, Artificial Sequence
  source: /note="Description of Artificial Sequence: Synthetic polynucleotide"
gagatcgtgctgacgcagtcgccggccaccctgagcctttcaccgggagaacgcgccactctgtcatgccgggccagcagctccgtgtcctccatgcattggtaccagcagaagccggggcaggccccgcggcctctcatcttcgccacctccaatctggcctccggcatccctgctcggtttagcggaagcggcagcggaactgactataccttgaccatctcctcgctggaaccagaggatgcagccgtgtactattgccagcagtggatcttcaacccgccaaccttcggcggcggcaccaaggtcgagattaag

SEQ ID NO: 2135 - protein, 248 aa, Artificial Sequence
  source: /note="Description of Artificial Sequence: Synthetic polypeptide"
QVQLVQSGAEVKKPGSSVKVSCKASGYTFTSYNMHWVRQAPGQGLEWMGAIYPGNGDTSYNPKFKGRVTITADKSTRTAYMELSSLRSEDTAVYYCARSYFYGSSSWYFDVWGQGTTVTVSSGGGGSGGGGSGGGGSGGGGSEIVLTQSPATLSLSPGERATLSCRASSSVSSMHWYQQKPGQAPRPLIFATSNLASGIPARFSGSGSGTDYTLTISSLEPEDAAVYYCQQWIFNPPTFGGGTKVEIK

SEQ ID NO: 2136 - DNA, 744 bp, Artificial Sequence
  source: /note="Description of Artificial Sequence: Synthetic polynucleotide"
caagtgcaactcgtccagtccggtgcagaagtcaagaagcctggttcatcggtgaaagtgtcctgcaaagcgtcgggctacaccttcacctcgtacaacatgcactgggtccgccaggcccccggacaaggactggaatggatgggtgctatctaccccggaaacggagataccagctacaaccccaagttcaagggacgcgtgaccattactgccgacaagtccacaagaaccgcctacatggaactgtccagcctgagatccgaggacactgcggtgtactactgtgcgaggtcctacttctacgggtcctcctcttggtacttcgacgtctggggacagggcactactgtgaccgtgtccagcgggggaggcggtagcggggggggtggatcgggcggcggcggatcaggaggaggagggtccgagatcgtgctgacgcagtcgccggccaccctgagcctttcaccgggagaacgcgccactctgtcatgccgggccagcagctccgtgtcctccatgcattggtaccagcagaagccggggcaggccccgcggcctctcatcttcgccacctccaatctggcctccggcatccctgctcggtttagcggaagcggcagcggaactgactataccttgaccatctcctcgctggaaccagaggatgcagccgtgtactattgccagcagtggatcttcaacccgccaaccttcggcggcggcaccaaggtcgagattaag

SEQ ID NO: 2137 - protein, 492 aa, Artificial Sequence
  source: /note="Description of Artificial Sequence: Synthetic polypeptide"
MALPVTALLLPLALLLHAARPQVQLVQSGAEVKKPGSSVKVSCKASGYTFTSYNMHWVRQAPGQGLEWMGAIYPGNGDTSYNPKFKGRVTITADKSTRTAYMELSSLRSEDTAVYYCARSYFYGSSSWYFDVWGQGTTVTVSSGGGGSGGGGSGGGGSGGGGSEIVLTQSPATLSLSPGERATLSCRASSSVSSMHWYQQKPGQAPRPLIFATSNLASGIPARFSGSGSGTDYTLTISSLEPEDAAVYYCQQWIFNPPTFGGGTKVEIKTTTPAPRPPTPAPTIASQPLSLRPEACRPAAGGAVHTRGLDFACDIYIWAPLAGTCGVLLLSLVITLYCKRGRKKLLYIFKQPFMRPVQTTQEEDGCSCRFPEEEEGGCELRVKFSRSADAPAYQQGQNQLYNELNLGRREEYDVLDKRRGRDPEMGGKPRRKNPQEGLYNELQKDKMAEAYSEIGMKGERRRGKGHDGLYQGLSTATKDTYDALHMQALPPR

SEQ ID NO: 2138 - DNA, 1476 bp, Artificial Sequence
  source: /note="Description of Artificial Sequence: Synthetic polynucleotide"
atggccctccctgtcaccgccctgctgcttccgctggctcttctgctccacgccgctcggccccaagtgcaactcgtccagtccggtgcagaagtcaagaagcctggttcatcggtgaaagtgtcctgcaaagcgtcgggctacaccttcacctcgtacaacatgcactgggtccgccaggcccccggacaaggactggaatggatgggtgctatctaccccggaaacggagataccagctacaaccccaagttcaagggacgcgtgaccattactgccgacaagtccacaagaaccgcctacatggaactgtccagcctgagatccgaggacactgcggtgtactactgtgcgaggtcctacttctacgggtcctcctcttggtacttcgacgtctggggacagggcactactgtgaccgtgtccagcgggggaggcggtagcggggggggtggatcgggcggcggcggatcaggaggaggagggtccgagatcgtgctgacgcagtcgccggccaccctgagcctttcaccgggagaacgcgccactctgtcatgccgggccagcagctccgtgtcctccatgcattggtaccagcagaagccggggcaggccccgcggcctctcatcttcgccacctccaatctggcctccggcatccctgctcggtttagcggaagcggcagcggaactgactataccttgaccatctcctcgctggaaccagaggatgcagccgtgtactattgccagcagtggatcttcaacccgccaaccttcggcggcggcaccaaggtcgagattaagaccactaccccagcaccgaggccacccaccccggctcctaccatcgcctcccagcctctgtccctgcgtccggaggcatgtagacccgcagctggtggggccgtgcatacccggggtcttgacttcgcctgcgatatctacatttgggcccctctggctggtacttgcggggtcctgctgctttcactcgtgatcactctttactgtaagcgcggtcggaagaagctgctgtacatctttaagcaacccttcatgaggcctgtgcagactactcaagaggaggacggctgttcatgccggttcccagaggaggaggaaggcggctgcgaactgcgcgtgaaattcagccgcagcgcagatgctccagcctaccagcaggggcagaaccagctctacaacgaactcaatcttggtcggagagaggagtacgacgtgctggacaagcggagaggacgggacccagaaatgggcgggaagccgcgcagaaagaatccccaagagggcctgtacaacgagctccaaaaggataagatggcagaagcctatagcgagattggtatgaaaggggaacgcagaagaggcaaaggccacgacggactgtaccagggactcagcaccgccaccaaggacacctatgacgctcttcacatgcaggccctgccgcctcgg

SEQ ID NO: 2139 - DNA, 366 bp, Artificial Sequence
  source: /note="Description of Artificial Sequence: Synthetic polynucleotide"
caagtgcaactcgtccagtccggtgcagaagtcaagaagccaggttcctcggtgaaagtgtcctgcaaagcctcgggttacaccttcacctcgtacaatatgcactgggtccgccaagctccgggacaaggcctggaatggatgggagcgatctaccccggaaacggcgacacgtcctacaacccgaagttcaagggaagagtgaccatcaccgccgacaagtccacccgcaccgcgtacatggagcttagcagcctgcggagcgaggacactgccgtgtattactgcgcccggtcctacttctatggatcatcctcgtggtacttcgatgtctggggccaggggaccaccgtgaccgtgtccagc

SEQ ID NO: 2140 - DNA, 318 bp, Artificial Sequence
  source: /note="Description of Artificial Sequence: Synthetic polynucleotide"
gatatccagctgacccagagcccttccttcctgtccgcttccgtgggagacagagtcactattacttgtcgggcctcctcatccgtgtcatccatgcactggtaccagcagaagccgggaaaggccccaaagcccttgatctttgccacttccaacctggcatccggcgtgccctcgaggttctccgggagcggttcagggaccgagtacactctgaccattagcagcctccagcctgaggactttgccacctactactgccagcagtggattttcaacccgcctacattcggagggggcactaaggtcgaaatcaag

SEQ ID NO: 2141 - protein, 248 aa, Artificial Sequence
  source: /note="Description of Artificial Sequence: Synthetic polypeptide"
QVQLVQSGAEVKKPGSSVKVSCKASGYTFTSYNMHWVRQAPGQGLEWMGAIYPGNGDTSYNPKFKGRVTITADKSTRTAYMELSSLRSEDTAVYYCARSYFYGSSSWYFDVWGQGTTVTVSSGGGGSGGGGSGGGGSGGGGSDIQLTQSPSFLSASVGDRVTITCRASSSVSSMHWYQQKPGKAPKPLIFATSNLASGVPSRFSGSGSGTEYTLTISSLQPEDFATYYCQQWIFNPPTFGGGTKVEIK

SEQ ID NO: 2142 - DNA, 744 bp, Artificial Sequence
  source: /note="Description of Artificial Sequence: Synthetic polynucleotide"
caagtgcaactcgtccagtccggtgcagaagtcaagaagccaggttcctcggtgaaagtgtcctgcaaagcctcgggttacaccttcacctcgtacaatatgcactgggtccgccaagctccgggacaaggcctggaatggatgggagcgatctaccccggaaacggcgacacgtcctacaacccgaagttcaagggaagagtgaccatcaccgccgacaagtccacccgcaccgcgtacatggagcttagcagcctgcggagcgaggacactgccgtgtattactgcgcccggtcctacttctatggatcatcctcgtggtacttcgatgtctggggccaggggaccaccgtgaccgtgtccagcggtggcggaggcagcggcggaggagggtctggaggaggcggctcggggggagggggctcggatatccagctgacccagagcccttccttcctgtccgcttccgtgggagacagagtcactattacttgtcgggcctcctcatccgtgtcatccatgcactggtaccagcagaagccgggaaaggccccaaagcccttgatctttgccacttccaacctggcatccggcgtgccctcgaggttctccgggagcggttcagggaccgagtacactctgaccattagcagcctccagcctgaggactttgccacctactactgccagcagtggattttcaacccgcctacattcggagggggcactaaggtcgaaatcaag

SEQ ID NO: 2143 - protein, 492 aa, Artificial Sequence
  source: /note="Description of Artificial Sequence: Synthetic polypeptide"
MALPVTALLLPLALLLHAARPQVQLVQSGAEVKKPGSSVKVSCKASGYTFTSYNMHWVRQAPGQGLEWMGAIYPGNGDTSYNPKFKGRVTITADKSTRTAYMELSSLRSEDTAVYYCARSYFYGSSSWYFDVWGQGTTVTVSSGGGGSGGGGSGGGGSGGGGSDIQLTQSPSFLSASVGDRVTITCRASSSVSSMHWYQQKPGKAPKPLIFATSNLASGVPSRFSGSGSGTEYTLTISSLQPEDFATYYCQQWIFNPPTFGGGTKVEIKTTTPAPRPPTPAPTIASQPLSLRPEACRPAAGGAVHTRGLDFACDIYIWAPLAGTCGVLLLSLVITLYCKRGRKKLLYIFKQPFMRPVQTTQEEDGCSCRFPEEEEGGCELRVKFSRSADAPAYQQGQNQLYNELNLGRREEYDVLDKRRGRDPEMGGKPRRKNPQEGLYNELQKDKMAEAYSEIGMKGERRRGKGHDGLYQGLSTATKDTYDALHMQALPPR

SEQ ID NO: 2144 - DNA, 1476 bp, Artificial Sequence
  source: /note="Description of Artificial Sequence: Synthetic polynucleotide"
atggccctccctgtcaccgccctgctgcttccgctggctcttctgctccacgccgctcggccccaagtgcaactcgtccagtccggtgcagaagtcaagaagccaggttcctcggtgaaagtgtcctgcaaagcctcgggttacaccttcacctcgtacaatatgcactgggtccgccaagctccgggacaaggcctggaatggatgggagcgatctaccccggaaacggcgacacgtcctacaacccgaagttcaagggaagagtgaccatcaccgccgacaagtccacccgcaccgcgtacatggagcttagcagcctgcggagcgaggacactgccgtgtattactgcgcccggtcctacttctatggatcatcctcgtggtacttcgatgtctggggccaggggaccaccgtgaccgtgtccagcggtggcggaggcagcggcggaggagggtctggaggaggcggctcggggggagggggctcggatatccagctgacccagagcccttccttcctgtccgcttccgtgggagacagagtcactattacttgtcgggcctcctcatccgtgtcatccatgcactggtaccagcagaagccgggaaaggccccaaagcccttgatctttgccacttccaacctggcatccggcgtgccctcgaggttctccgggagcggttcagggaccgagtacactctgaccattagcagcctccagcctgaggactttgccacctactactgccagcagtggattttcaacccgcctacattcggagggggcactaaggtcgaaatcaagaccactaccccagcaccgaggccacccaccccggctcctaccatcgcctcccagcctctgtccctgcgtccggaggcatgtagacccgcagctggtggggccgtgcatacccggggtcttgacttcgcctgcgatatctacatttgggcccctctggctggtacttgcggggtcctgctgctttcactcgtgatcactctttactgtaagcgcggtcggaagaagctgctgtacatctttaagcaacccttcatgaggcctgtgcagactactcaagaggaggacggctgttcatgccggttcccagaggaggaggaaggcggctgcgaactgcgcgtgaaattcagccgcagcgcagatgctccagcctaccagcaggggcagaaccagctctacaacgaactcaatcttggtcggagagaggagtacgacgtgctggacaagcggagaggacgggacccagaaatgggcgggaagccgcgcagaaagaatccccaagagggcctgtacaacgagctccaaaaggataagatggcagaagcctatagcgagattggtatgaaaggggaacgcagaagaggcaaaggccacgacggactgtaccagggactcagcaccgccaccaaggacacctatgacgctcttcacatgcaggccctgccgcctcgg

SEQ ID NO: 2145 - protein, 5 aa, Artificial Sequence
  source: /note="Description of Artificial Sequence: Synthetic peptide"
RYNMH

SEQ ID NO: 2146 - protein, 17 aa, Artificial Sequence
  source: /note="Description of Artificial Sequence: Synthetic peptide"
AIYPGNGDTSYSQKFKG

SEQ ID NO: 2147 - protein, 13 aa, Artificial Sequence
  source: /note="Description of Artificial Sequence: Synthetic peptide"
SFFYGSSDWYFDV

SEQ ID NO: 2148 - protein, 7 aa, Artificial Sequence
  source: /note="Description of Artificial Sequence: Synthetic peptide"
GYTFTRY

SEQ ID NO: 2149 - protein, 8 aa, Artificial Sequence
  source: /note="Description of Artificial Sequence: Synthetic peptide"
GYTFTRYN

SEQ ID NO: 2150 - protein, 15 aa, Artificial Sequence
  source: /note="Description of Artificial Sequence: Synthetic peptide"
ARSFFYGSSDWYFDV

SEQ ID NO: 2151 - protein, 10 aa, Artificial Sequence
  source: /note="Description of Artificial Sequence: Synthetic peptide"
GYTFTRYNMH

SEQ ID NO: 2152 - protein, 122 aa, Artificial Sequence
  source: /note="Description of Artificial Sequence: Synthetic polypeptide"
QVQLVQSGAEVKKPGASVKVSCKASGYTFTRYNMHWVRQAPGQRLEWMGAIYPGNGDTSYSQKFKGRVTITADKSASTAYMELSSLRSEDTAVYYCARSFFYGSSDWYFDVWGQGTTVTVSS

SEQ ID NO: 2153 - DNA, 366 bp, Artificial Sequence
  source: /note="Description of Artificial Sequence: Synthetic polynucleotide"
caagtccaactcgtccagtcaggagcagaagtcaagaaaccaggagcatccgtgaaagtgtcgtgcaaagcctctggctacaccttcacccggtacaacatgcactgggtcagacaggccccgggacagcggctcgagtggatgggtgccatctaccccggcaacggggacacctcctactcccaaaagttcaagggtcgcgtgaccatcacggcggataagtcggccagcactgcgtacatggaattgtcatccctgcgctccgaggataccgccgtgtattactgcgcgcggtccttcttctacggctcctccgattggtacttcgacgtctggggacagggaactaccgtgaccgtgtcctcc

SEQ ID NO: 2154 - protein, 10 aa, Artificial Sequence
  source: /note="Description of Artificial Sequence: Synthetic peptide"
RASSSVNNMH

SEQ ID NO: 2155 - protein, 6 aa, Artificial Sequence
  source: /note="Description of Artificial Sequence: Synthetic peptide"
SSSVNN

SEQ ID NO: 2156 - protein, 5 aa, Artificial Sequence
  source: /note="Description of Artificial Sequence: Synthetic peptide"
SSVNN

SEQ ID NO: 2157 - protein, 106 aa, Artificial Sequence
  source: /note="Description of Artificial Sequence: Synthetic polypeptide"
EIVLTQSPDFQSVTPKEKVTITCRASSSVNNMHWYQQKPDQSPKPLIYATSNLASGVPSRFSGSGSGTDYTLTINSLEAEDAATYYCQQWIFNPPTFGQGTKLEIK

SEQ ID NO: 2158 - DNA, 318 bp, Artificial Sequence
  source: /note="Description of Artificial Sequence: Synthetic polynucleotide"
gaaatcgtgctgactcagtcgccggacttccaaagcgtgaccccaaaggagaaggtcaccatcacctgtagagcctcatcgtccgtgaacaatatgcactggtaccagcagaagccggaccagtcccctaagcccctgatctacgccacttccaacctggcctccggcgtgccgtcgaggttcagcggctcgggcagcgggaccgactacaccctgaccatcaacagccttgaagctgaggacgccgctacctactactgccagcagtggattttcaaccctcccacatttggacagggcactaagctggagattaag

SEQ ID NO: 2159 - protein, 248 aa, Artificial Sequence
  source: /note="Description of Artificial Sequence: Synthetic polypeptide"
QVQLVQSGAEVKKPGASVKVSCKASGYTFTRYNMHWVRQAPGQRLEWMGAIYPGNGDTSYSQKFKGRVTITADKSASTAYMELSSLRSEDTAVYYCARSFFYGSSDWYFDVWGQGTTVTVSSGGGGSGGGGSGGGGSGGGGSEIVLTQSPDFQSVTPKEKVTITCRASSSVNNMHWYQQKPDQSPKPLIYATSNLASGVPSRFSGSGSGTDYTLTINSLEAEDAATYYCQQWIFNPPTFGQGTKLEIK

SEQ ID NO: 2160 - DNA, 744 bp, Artificial Sequence
  source: /note="Description of Artificial Sequence: Synthetic polynucleotide"
caagtccaactcgtccagtcaggagcagaagtcaagaaaccaggagcatccgtgaaagtgtcgtgcaaagcctctggctacaccttcacccggtacaacatgcactgggtcagacaggccccgggacagcggctcgagtggatgggtgccatctaccccggcaacggggacacctcctactcccaaaagttcaagggtcgcgtgaccatcacggcggataagtcggccagcactgcgtacatggaattgtcatccctgcgctccgaggataccgccgtgtattactgcgcgcggtccttcttctacggctcctccgattggtacttcgacgtctggggacagggaactaccgtgaccgtgtcctccgggggtggcgggagcggagggggcggaagcgggggtggaggatcaggaggcggaggctccgaaatcgtgctgactcagtcgccggacttccaaagcgtgaccccaaaggagaaggtcaccatcacctgtagagcctcatcgtccgtgaacaatatgcactggtaccagcagaagccggaccagtcccctaagcccctgatctacgccacttccaacctggcctccggcgtgccgtcgaggttcagcggctcgggcagcgggaccgactacaccctgaccatcaacagccttgaagctgaggacgccgctacctactactgccagcagtggattttcaaccctcccacatttggacagggcactaagctggagattaag

SEQ ID NO: 2161 - protein, 492 aa, Artificial Sequence
  source: /note="Description of Artificial Sequence: Synthetic polypeptide"
MALPVTALLLPLALLLHAARPQVQLVQSGAEVKKPGASVKVSCKASGYTFTRYNMHWVRQAPGQRLEWMGAIYPGNGDTSYSQKFKGRVTITADKSASTAYMELSSLRSEDTAVYYCARSFFYGSSDWYFDVWGQGTTVTVSSGGGGSGGGGSGGGGSGGGGSEIVLTQSPDFQSVTPKEKVTITCRASSSVNNMHWYQQKPDQSPKPLIYATSNLASGVPSRFSGSGSGTDYTLTINSLEAEDAATYYCQQWIFNPPTFGQGTKLEIKTTTPAPRPPTPAPTIASQPLSLRPEACRPAAGGAVHTRGLDFACDIYIWAPLAGTCGVLLLSLVITLYCKRGRKKLLYIFKQPFMRPVQTTQEEDGCSCRFPEEEEGGCELRVKFSRSADAPAYQQGQNQLYNELNLGRREEYDVLDKRRGRDPEMGGKPRRKNPQEGLYNELQKDKMAEAYSEIGMKGERRRGKGHDGLYQGLSTATKDTYDALHMQALPPR

SEQ ID NO: 2162 - DNA, 1476 bp, Artificial Sequence
  source: /note="Description of Artificial Sequence: Synthetic polynucleotide"
atggccctccctgtcaccgccctgctgcttccgctggctcttctgctccacgccgctcggccccaagtccaactcgtccagtcaggagcagaagtcaagaaaccaggagcatccgtgaaagtgtcgtgcaaagcctctggctacaccttcacccggtacaacatgcactgggtcagacaggccccgggacagcggctcgagtggatgggtgccatctaccccggcaacggggacacctcctactcccaaaagttcaagggtcgcgtgaccatcacggcggataagtcggccagcactgcgtacatggaattgtcatccctgcgctccgaggataccgccgtgtattactgcgcgcggtccttcttctacggctcctccgattggtacttcgacgtctggggacagggaactaccgtgaccgtgtcctccgggggtggcgggagcggagggggcggaagcgggggtggaggatcaggaggcggaggctccgaaatcgtgctgactcagtcgccggacttccaaagcgtgaccccaaaggagaaggtcaccatcacctgtagagcctcatcgtccgtgaacaatatgcactggtaccagcagaagccggaccagtcccctaagcccctgatctacgccacttccaacctggcctccggcgtgccgtcgaggttcagcggctcgggcagcgggaccgactacaccctgaccatcaacagccttgaagctgaggacgccgctacctactactgccagcagtggattttcaaccctcccacatttggacagggcactaagctggagattaagaccactaccccagcaccgaggccacccaccccggctcctaccatcgcctcccagcctctgtccctgcgtccggaggcatgtagacccgcagctggtggggccgtgcatacccggggtcttgacttcgcctgcgatatctacatttgggcccctctggctggtacttgcggggtcctgctgctttcactcgtgatcactctttactgtaagcgcggtcggaagaagctgctgtacatctttaagcaacccttcatgaggcctgtgcagactactcaagaggaggacggctgttcatgccggttcccagaggaggaggaaggcggctgcgaactgcgcgtgaaattcagccgcagcgcagatgctccagcctaccagcaggggcagaaccagctctacaacgaactcaatcttggtcggagagaggagtacgacgtgctggacaagcggagaggacgggacccagaaatgggcgggaagccgcgcagaaagaatccccaagagggcctgtacaacgagctccaaaaggataagatggcagaagcctatagcgagattggtatgaaaggggaacgcagaagaggcaaaggccacgacggactgtaccagggactcagcaccgccaccaaggacacctatgacgctcttcacatgcaggccctgccgcctcgg

SEQ ID NO: 2163 - DNA, 366 bp, Artificial Sequence
  source: /note="Description of Artificial Sequence: Synthetic polynucleotide"
caagtgcaactcgtccaatccggcgcggaagtcaaaaagcctggagcctccgtcaaagtgtcctgcaaggcctccggttacactttcactcgctacaacatgcattgggtgcggcaggccccgggacagcgcctggaatggatgggcgcaatctaccccggcaacggagacacctcctattcccaaaagttcaagggaagggtcacaatcacggccgacaagagcgcctcaactgcctacatggagctgagcagcctcagatccgaagataccgcggtgtactactgcgcccggagcttcttctacggttcgtctgattggtactttgacgtctggggccagggaaccaccgtgaccgtgtcgtcc

SEQ ID NO: 2164 - protein, 106 aa, Artificial Sequence
  source: /note="Description of Artificial Sequence: Synthetic polypeptide"
DIQLTQSPSFLSASVGDRVTITCRASSSVNNMHWYQQKPGKAPKPLIYATSNLASGVPSRFSGSGSGTEYTLTISSLQPEDFATYYCQQWIFNPPTFGQGTKLEIK

SEQ ID NO: 2165 - DNA, 318 bp, Artificial Sequence
  source: /note="Description of Artificial Sequence: Synthetic polynucleotide"
gacatccagcttacccagtcgccatcattcctgtccgcatcagtgggtgatcgcgtgaccattacctgtcgggcgtcctcctccgtgaacaacatgcactggtaccagcagaagccggggaaggctcccaagcctctgatctacgccactagcaatttggccagcggcgtgccttcgagattctcggggtcgggctcaggaaccgagtataccctgaccatttcctccctccaaccggaggactttgctacttactactgccagcagtggattttcaaccccccgactttcggacagggcaccaagctggaaatcaag

SEQ ID NO: 2166 - protein, 248 aa, Artificial Sequence
  source: /note="Description of Artificial Sequence: Synthetic polypeptide"
QVQLVQSGAEVKKPGASVKVSCKASGYTFTRYNMHWVRQAPGQRLEWMGAIYPGNGDTSYSQKFKGRVTITADKSASTAYMELSSLRSEDTAVYYCARSFFYGSSDWYFDVWGQGTTVTVSSGGGGSGGGGSGGGGSGGGGSDIQLTQSPSFLSASVGDRVTITCRASSSVNNMHWYQQKPGKAPKPLIYATSNLASGVPSRFSGSGSGTEYTLTISSLQPEDFATYYCQQWIFNPPTFGQGTKLEIK

SEQ ID NO: 2167 - DNA, 744 bp, Artificial Sequence
  source: /note="Description of Artificial Sequence: Synthetic polynucleotide"
caagtgcaactcgtccaatccggcgcggaagtcaaaaagcctggagcctccgtcaaagtgtcctgcaaggcctccggttacactttcactcgctacaacatgcattgggtgcggcaggccccgggacagcgcctggaatggatgggcgcaatctaccccggcaacggagacacctcctattcccaaaagttcaagggaagggtcacaatcacggccgacaagagcgcctcaactgcctacatggagctgagcagcctcagatccgaagataccgcggtgtactactgcgcccggagcttcttctacggttcgtctgattggtactttgacgtctggggccagggaaccaccgtgaccgtgtcgtccggtggcggagggagcggtggaggaggctccgggggaggaggcagcggcgggggaggcagcgacatccagcttacccagtcgccatcattcctgtccgcatcagtgggtgatcgcgtgaccattacctgtcgggcgtcctcctccgtgaacaacatgcactggtaccagcagaagccggggaaggctcccaagcctctgatctacgccactagcaatttggccagcggcgtgccttcgagattctcggggtcgggctcaggaaccgagtataccctgaccatttcctccctccaaccggaggactttgctacttactactgccagcagtggattttcaaccccccgactttcggacagggcaccaagctggaaatcaag

SEQ ID NO: 2168 - protein, 492 aa, Artificial Sequence
  source: /note="Description of Artificial Sequence: Synthetic polypeptide"
MALPVTALLLPLALLLHAARPQVQLVQSGAEVKKPGASVKVSCKASGYTFTRYNMHWVRQAPGQRLEWMGAIYPGNGDTSYSQKFKGRVTITADKSASTAYMELSSLRSEDTAVYYCARSFFYGSSDWYFDVWGQGTTVTVSSGGGGSGGGGSGGGGSGGGGSDIQLTQSPSFLSASVGDRVTITCRASSSVNNMHWYQQKPGKAPKPLIYATSNLASGVPSRFSGSGSGTEYTLTISSLQPEDFATYYCQQWIFNPPTFGQGTKLEIKTTTPAPRPPTPAPTIASQPLSLRPEACRPAAGGAVHTRGLDFACDIYIWAPLAGTCGVLLLSLVITLYCKRGRKKLLYIFKQPFMRPVQTTQEEDGCSCRFPEEEEGGCELRVKFSRSADAPAYQQGQNQLYNELNLGRREEYDVLDKRRGRDPEMGGKPRRKNPQEGLYNELQKDKMAEAYSEIGMKGERRRGKGHDGLYQGLSTATKDTYDALHMQALPPR

SEQ ID NO: 2169 - DNA, 1476 bp, Artificial Sequence
  source: /note="Description of Artificial Sequence: Synthetic polynucleotide"
atggccctccctgtcaccgccctgctgcttccgctggctcttctgctccacgccgctcggccccaagtgcaactcgtccaatccggcgcggaagtcaaaaagcctggagcctccgtcaaagtgtcctgcaaggcctccggttacactttcactcgctacaacatgcattgggtgcggcaggccccgggacagcgcctggaatggatgggcgcaatctaccccggcaacggagacacctcctattcccaaaagttcaagggaagggtcacaatcacggccgacaagagcgcctcaactgcctacatggagctgagcagcctcagatccgaagataccgcggtgtactactgcgcccggagcttcttctacggttcgtctgattggtactttgacgtctggggccagggaaccaccgtgaccgtgtcgtccggtggcggagggagcggtggaggaggctccgggggaggaggcagcggcgggggaggcagcgacatccagcttacccagtcgccatcattcctgtccgcatcagtgggtgatcgcgtgaccattacctgtcgggcgtcctcctccgtgaacaacatgcactggtaccagcagaagccggggaaggctcccaagcctctgatctacgccactagcaatttggccagcggcgtgccttcgagattctcggggtcgggctcaggaaccgagtataccctgaccatttcctccctccaaccggaggactttgctacttactactgccagcagtggattttcaaccccccgactttcggacagggcaccaagctggaaatcaagaccactaccccagcaccgaggccacccaccccggctcctaccatcgcctcccagcctctgtccctgcgtccggaggcatgtagacccgcagctggtggggccgtgcatacccggggtcttgacttcgcctgcgatatctacatttgggcccctctggctggtacttgcggggtcctgctgctttcactcgtgatcactctttactgtaagcgcggtcggaagaagctgctgtacatctttaagcaacccttcatgaggcctgtgcagactactcaagaggaggacggctgttcatgccggttcccagaggaggaggaaggcggctgcgaactgcgcgtgaaattcagccgcagcgcagatgctccagcctaccagcaggggcagaaccagctctacaacgaactcaatcttggtcggagagaggagtacgacgtgctggacaagcggagaggacgggacccagaaatgggcgggaagccgcgcagaaagaatccccaagagggcctgtacaacgagctccaaaaggataagatggcagaagcctatagcgagattggtatgaaaggggaacgcagaagaggcaaaggccacgacggactgtaccagggactcagcaccgccaccaaggacacctatgacgctcttcacatgcaggccctgccgcctcgg

SEQ ID NO: 2170 - protein, 122 aa, Artificial Sequence
  source: /note="Description of Artificial Sequence: Synthetic polypeptide"
QVQLVQSGAEVKKPGSSVKVSCKASGYTFTRYNMHWVRQAPGQGLEWMGAIYPGNGDTSYSQKFKGRVTITADKSTSTAYMELSSLRSEDTAVYYCARSFFYGSSDWYFDVWGQGTTVTVSS

SEQ ID NO: 2171 - DNA, 366 bp, Artificial Sequence
  source: /note="Description of Artificial Sequence: Synthetic polynucleotide"
caagtgcaactcgtccagtccggtgcagaagtcaagaagcctggttcctccgtgaaagtgtcctgcaaagcgtctggctacaccttcacccggtacaatatgcactgggtcagacaggcgcccggacagggcctggagtggatgggggccatctaccctgggaacggcgacactagctactcccaaaagttcaagggccgcgtgacgattaccgccgacaagtcaaccagcactgcctatatggagctgagctcgcttcggagcgaagataccgccgtgtactactgcgctcggagcttcttctacgggtcctcggattggtacttcgacgtctggggccaggggactactgtgaccgtgtcctcc

SEQ ID NO: 2172 - DNA, 318 bp, Artificial Sequence
  source: /note="Description of Artificial Sequence: Synthetic polynucleotide"
gaaatcgtgctgacccagtccccggactttcagtcagtgactcccaaggagaaggtcaccattacttgtcgcgcctcctcctcggtgaacaacatgcactggtaccagcagaagccggaccagtccccgaagcccctgatctatgctacctccaacttggcgtccggcgtgccgtcaaggttcagcggatcgggttccgggacagactacaccctgactattaactcactcgaggccgaggatgccgccacctactactgccagcagtggatcttcaaccctccaaccttcggacaaggaaccaagctggaaatcaag

SEQ ID NO: 2173 - protein, 248 aa, Artificial Sequence
  source: /note="Description of Artificial Sequence: Synthetic polypeptide"
QVQLVQSGAEVKKPGSSVKVSCKASGYTFTRYNMHWVRQAPGQGLEWMGAIYPGNGDTSYSQKFKGRVTITADKSTSTAYMELSSLRSEDTAVYYCARSFFYGSSDWYFDVWGQGTTVTVSSGGGGSGGGGSGGGGSGGGGSEIVLTQSPDFQSVTPKEKVTITCRASSSVNNMHWYQQKPDQSPKPLIYATSNLASGVPSRFSGSGSGTDYTLTINSLEAEDAATYYCQQWIFNPPTFGQGTKLEIK

SEQ ID NO: 2174 - DNA, 744 bp, Artificial Sequence
  source: /note="Description of Artificial Sequence: Synthetic polynucleotide"
caagtgcaactcgtccagtccggtgcagaagtcaagaagcctggttcctccgtgaaagtgtcctgcaaagcgtctggctacaccttcacccggtacaatatgcactgggtcagacaggcgcccggacagggcctggagtggatgggggccatctaccctgggaacggcgacactagctactcccaaaagttcaagggccgcgtgacgattaccgccgacaagtcaaccagcactgcctatatggagctgagctcgcttcggagcgaagataccgccgtgtactactgcgctcggagcttcttctacgggtcctcggattggtacttcgacgtctggggccaggggactactgtgaccgtgtcctccgggggaggaggatcgggcggaggcggttcgggaggcggcggaagcggaggcggaggttcagaaatcgtgctgacccagtccccggactttcagtcagtgactcccaaggagaaggtcaccattacttgtcgcgcctcctcctcggtgaacaacatgcactggtaccagcagaagccggaccagtccccgaagcccctgatctatgctacctccaacttggcgtccggcgtgccgtcaaggttcagcggatcgggttccgggacagactacaccctgactattaactcactcgaggccgaggatgccgccacctactactgccagcagtggatcttcaaccctccaaccttcggacaaggaaccaagctggaaatcaag

SEQ ID NO: 2175 - protein, 492 aa, Artificial Sequence
  source: /note="Description of Artificial Sequence: Synthetic polypeptide"
MALPVTALLLPLALLLHAARPQVQLVQSGAEVKKPGSSVKVSCKASGYTFTRYNMHWVRQAPGQGLEWMGAIYPGNGDTSYSQKFKGRVTITADKSTSTAYMELSSLRSEDTAVYYCARSFFYGSSDWYFDVWGQGTTVTVSSGGGGSGGGGSGGGGSGGGGSEIVLTQSPDFQSVTPKEKVTITCRASSSVNNMHWYQQKPDQSPKPLIYATSNLASGVPSRFSGSGSGTDYTLTINSLEAEDAATYYCQQWIFNPPTFGQGTKLEIKTTTPAPRPPTPAPTIASQPLSLRPEACRPAAGGAVHTRGLDFACDIYIWAPLAGTCGVLLLSLVITLYCKRGRKKLLYIFKQPFMRPVQTTQEEDGCSCRFPEEEEGGCELRVKFSRSADAPAYQQGQNQLYNELNLGRREEYDVLDKRRGRDPEMGGKPRRKNPQEGLYNELQKDKMAEAYSEIGMKGERRRGKGHDGLYQGLSTATKDTYDALHMQALPPR

SEQ ID NO: 2176 - DNA, 1476 bp, Artificial Sequence
  source: /note="Description of Artificial Sequence: Synthetic polynucleotide"
atggccctccctgtcaccgccctgctgcttccgctggctcttctgctccacgccgctcggccccaagtgcaactcgtccagtccggtgcagaagtcaagaagcctggttcctccgtgaaagtgtcctgcaaagcgtctggctacaccttcacccggtacaatatgcactgggtcagacaggcgcccggacagggcctggagtggatgggggccatctaccctgggaacggcgacactagctactcccaaaagttcaagggccgcgtgacgattaccgccgacaagtcaaccagcactgcctatatggagctgagctcgcttcggagcgaagataccgccgtgtactactgcgctcggagcttcttctacgggtcctcggattggtacttcgacgtctggggccaggggactactgtgaccgtgtcctccgggggaggaggatcgggcggaggcggttcgggaggcggcggaagcggaggcggaggttcagaaatcgtgctgacccagtccccggactttcagtcagtgactcccaaggagaaggtcaccattacttgtcgcgcctcctcctcggtgaacaacatgcactggtaccagcagaagccggaccagtccccgaagcccctgatctatgctacctccaacttggcgtccggcgtgccgtcaaggttcagcggatcgggttccgggacagactacaccctgactattaactcactcgaggccgaggatgccgccacctactactgccagcagtggatcttcaaccctccaaccttcggacaaggaaccaagctggaaatcaagaccactaccccagcaccgaggccacccaccccggctcctaccatcgcctcccagcctctgtccctgcgtccggaggcatgtagacccgcagctggtggggccgtgcatacccggggtcttgacttcgcctgcgatatctacatttgggcccctctggctggtacttgcggggtcctgctgctttcactcgtgatcactctttactgtaagcgcggtcggaagaagctgctgtacatctttaagcaacccttcatgaggcctgtgcagactactcaagaggaggacggctgttcatgccggttcccagaggaggaggaaggcggctgcgaactgcgcgtgaaattcagccgcagcgcagatgctccagcctaccagcaggggcagaaccagctctacaacgaactcaatcttggtcggagagaggagtacgacgtgctggacaagcggagaggacgggacccagaaatgggcgggaagccgcgcagaaagaatccccaagagggcctgtacaacgagctccaaaaggataagatggcagaagcctatagcgagattggtatgaaaggggaacgcagaagaggcaaaggccacgacggactgtaccagggactcagcaccgccaccaaggacacctatgacgctcttcacatgcaggccctgccgcctcgg

SEQ ID NO: 2177 - DNA, 366 bp, Artificial Sequence
  source: /note="Description of Artificial Sequence: Synthetic polynucleotide"
caagtccaactcgtccagtctggcgcagaagtcaagaagcccggaagctccgtgaaagtgtcctgcaaagcgtcgggttacactttcacccggtacaacatgcactgggtcagacaggcccctggacaaggactggagtggatgggtgccatctaccctggaaacggagatacctcctactcccaaaagttcaaggggagagtgaccattaccgccgacaagtcaacttccaccgcttacatggagctcagctccctgcggtccgaagatactgcggtgtactattgcgctcgctcatttttctacggctcatcggattggtacttcgacgtctggggacagggaactaccgtgaccgtgtcctcg

SEQ ID NO: 2178 - DNA, 318 bp, Artificial Sequence
  source: /note="Description of Artificial Sequence: Synthetic polynucleotide"
gacatccagctgactcagtccccgtccttcctgtccgcctccgtgggggaccgcgtgacgattacttgtcgggcctcctcatccgtgaacaacatgcattggtaccagcagaagccaggaaaggcaccgaagccgcttatctatgccacctcgaatctggccagcggagtgccttcgaggtttagcggctccggctccggcaccgagtacactttgaccattagcagcctccagccggaggacttcgccacatactactgccagcagtggatcttcaacccccccaccttcggccaaggaaccaagctggaaatcaag

SEQ ID NO: 2179 - protein, 248 aa, Artificial Sequence
  source: /note="Description of Artificial Sequence: Synthetic polypeptide"
QVQLVQSGAEVKKPGSSVKVSCKASGYTFTRYNMHWVRQAPGQGLEWMGAIYPGNGDTSYSQKFKGRVTITADKSTSTAYMELSSLRSEDTAVYYCARSFFYGSSDWYFDVWGQGTTVTVSSGGGGSGGGGSGGGGSGGGGSDIQLTQSPSFLSASVGDRVTITCRASSSVNNMHWYQQKPGKAPKPLIYATSNLASGVPSRFSGSGSGTEYTLTISSLQPEDFATYYCQQWIFNPPTFGQGTKLEIK

SEQ ID NO: 2180 - DNA, 744 bp, Artificial Sequence
  source: /note="Description of Artificial Sequence: Synthetic polynucleotide"
caagtccaactcgtccagtctggcgcagaagtcaagaagcccggaagctccgtgaaagtgtcctgcaaagcgtcgggttacactttcacccggtacaacatgcactgggtcagacaggcccctggacaaggactggagtggatgggtgccatctaccctggaaacggagatacctcctactcccaaaagttcaaggggagagtgaccattaccgccgacaagtcaacttccaccgcttacatggagctcagctccctgcggtccgaagatactgcggtgtactattgcgctcgctcatttttctacggctcatcggattggtacttcgacgtctggggacagggaactaccgtgaccgtgtcctcggggggaggaggatcgggcggaggcggttcgggaggcggcggaagcggaggcggaggttcagacatccagctgactcagtccccgtccttcctgtccgcctccgtgggggaccgcgtgacgattacttgtcgggcctcctcatccgtgaacaacatgcattggtaccagcagaagccaggaaaggcaccgaagccgcttatctatgccacctcgaatctggccagcggagtgccttcgaggtttagcggctccggctccggcaccgagtacactttgaccattagcagcctccagccggaggacttcgccacatactactgccagcagtggatcttcaacccccccaccttcggccaaggaaccaagctggaaatcaag

SEQ ID NO: 2181 - protein, 492 aa, Artificial Sequence
  source: /note="Description of Artificial Sequence: Synthetic polypeptide"
MALPVTALLLPLALLLHAARPQVQLVQSGAEVKKPGSSVKVSCKASGYTFTRYNMHWVRQAPGQGLEWMGAIYPGNGDTSYSQKFKGRVTITADKSTSTAYMELSSLRSEDTAVYYCARSFFYGSSDWYFDVWGQGTTVTVSSGGGGSGGGGSGGGGSGGGGSDIQLTQSPSFLSASVGDRVTITCRASSSVNNMHWYQQKPGKAPKPLIYATSNLASGVPSRFSGSGSGTEYTLTISSLQPEDFATYYCQQWIFNPPTFGQGTKLEIKTTTPAPRPPTPAPTIASQPLSLRPEACRPAAGGAVHTRGLDFACDIYIWAPLAGTCGVLLLSLVITLYCKRGRKKLLYIFKQPFMRPVQTTQEEDGCSCRFPEEEEGGCELRVKFSRSADAPAYQQGQNQLYNELNLGRREEYDVLDKRRGRDPEMGGKPRRKNPQEGLYNELQKDKMAEAYSEIGMKGERRRGKGHDGLYQGLSTATKDTYDALHMQALPPR

SEQ ID NO: 2182 - DNA, 1476 bp, Artificial Sequence
  source: /note="Description of Artificial Sequence: Synthetic polynucleotide"
atggccctccctgtcaccgccctgctgcttccgctggctcttctgctccacgccgctcggccccaagtccaactcgtccagtctggcgcagaagtcaagaagcccggaagctccgtgaaagtgtcctgcaaagcgtcgggttacactttcacccggtacaacatgcactgggtcagacaggcccctggacaaggactggagtggatgggtgccatctaccctggaaacggagatacctcctactcccaaaagttcaaggggagagtgaccattaccgccgacaagtcaacttccaccgcttacatggagctcagctccctgcggtccgaagatactgcggtgtactattgcgctcgctcatttttctacggctcatcggattggtacttcgacgtctggggacagggaactaccgtgaccgtgtcctcggggggaggggggagcggcggagggggctcgggcggtggaggaagcggaggcggcggttcggacatccagctgactcagtccccgtccttcctgtccgcctccgtgggggaccgcgtgacgattacttgtcgggcctcctcatccgtgaacaacatgcattggtaccagcagaagccaggaaaggcaccgaagccgcttatctatgccacctcgaatctggccagcggagtgccttcgaggtttagcggctccggctccggcaccgagtacactttgaccattagcagcctccagccggaggacttcgccacatactactgccagcagtggatcttcaacccccccaccttcggccaaggaaccaagctggaaatcaagaccactaccccagcaccgaggccacccaccccggctcctaccatcgcctcccagcctctgtccctgcgtccggaggcatgtagacccgcagctggtggggccgtgcatacccggggtcttgacttcgcctgcgatatctacatttgggcccctctggctggtacttgcggggtcctgctgctttcactcgtgatcactctttactgtaagcgcggtcggaagaagctgctgtacatctttaagcaacccttcatgaggcctgtgcagactactcaagaggaggacggctgttcatgccggttcccagaggaggaggaaggcggctgcgaactgcgcgtgaaattcagccgcagcgcagatgctccagcctaccagcaggggcagaaccagctctacaacgaactcaatcttggtcggagagaggagtacgacgtgctggacaagcggagaggacgggacccagaaatgggcgggaagccgcgcagaaagaatccccaagagggcctgtacaacgagctccaaaaggataagatggcagaagcctatagcgagattggtatgaaaggggaacgcagaagaggcaaaggccacgacggactgtaccagggactcagcaccgccaccaaggacacctatgacgctcttcacatgcaggccctgccgcctcgg

SEQ ID NO: 2183 - protein, 122 aa, Artificial Sequence
  source: /note="Description of Artificial Sequence: Synthetic polypeptide"
QVHLQQSGAELAKPGASVKMSCKASGYTFTNYWMHWVKQRPGQGLEWIGFITPTTGYPEYNQKFKDKATLTADKSSSTAYMQLSSLTSEDSAVYYCARRKVGKGVYYALDYWGQGTSVTVSS

SEQ ID NO: 2184 - DNA, 366 bp, Artificial Sequence
  source: /note="Description of Artificial Sequence: Synthetic polynucleotide"
caagtgcatctgcagcagtcgggggccgaactggcaaagccaggcgccagcgtgaagatgagctgcaaggcctccgggtacaccttcaccaactactggatgcactgggtcaagcagcgcccgggccagggactcgagtggatcgggttcatcacgccgactaccggctacccggagtataaccagaagttcaaggacaaggccactctgactgccgacaagtcctcgtctaccgcgtacatgcaactgtcctcactgacttcggaggattccgctgtgtactactgcgcgcggaggaaagtcggaaagggagtgtactatgccctggactactggggccagggtaccagcgtcactgtgtcctcc

SEQ ID NO: 2185 - protein, 107 aa, Artificial Sequence
  source: /note="Description of Artificial Sequence: Synthetic polypeptide"
DILMTQSPASLSASVGETVTITCRASGNIHNYLAWYQQKQGNSPQLLVYNTKTLADGVPSRFSGSGSGTQYSLKINSLQTEDFGTYYCQHFWSSPWTFGGGTKLEIK

SEQ ID NO: 2186 - DNA, 321 bp, Artificial Sequence
  source: /note="Description of Artificial Sequence: Synthetic polynucleotide"
gacattctgatgacccagtcccctgcatcactctccgcgtccgtgggagaaaccgtgaccatcacgtgtagagcctccggcaacatccacaactacctggcctggtaccagcagaagcagggaaactcgccccaactgcttgtgtacaacaccaagaccttggctgacggagtgccttcccggttctcgggttcgggatcaggcacacagtactccctgaaaatcaatagcctccagaccgaagattttggaacctactactgccaacacttctggagctccccctggactttcggaggcggtaccaagctcgagattaag

SEQ ID NO: 2187 - protein, 122 aa, Artificial Sequence
  source: /note="Description of Artificial Sequence: Synthetic polypeptide"
QVQLQQPGAELVKPGASVKMSCKASGYTFTNYNLHWVKQTPGQGLEWIGAIYPGNYDTSYNQKFKGKATLTADKSSSTAYMLLSSLTSEDSAVYFCARVDFGHSRYWYFDVWGAGTTVTVSS

SEQ ID NO: 2188 - DNA, 366 bp, Artificial Sequence
  source: /note="Description of Artificial Sequence: Synthetic polynucleotide"
caagtgcagctgcagcagcctggtgccgagctcgtgaagccgggagcgtccgtgaagatgagctgcaaagcctcgggctacaccttcaccaattacaacttgcattgggtcaagcagaccccgggccagggcctcgaatggatcggagcgatctaccccgggaactacgatactagctacaaccagaagttcaagggaaaggccaccctgaccgccgataagtcctcatccaccgcctacatgctgctgtcctcgctgacttccgaggactccgctgtgtacttctgcgcccgcgtggacttcggacacagcagatattggtattttgacgtctggggcgccgggactaccgtgactgtgtcgtcc

SEQ ID NO: 2189 - protein, 106 aa, Artificial Sequence
  source: /note="Description of Artificial Sequence: Synthetic polypeptide"
QIVLSQSPAILSASPGEKVTMTCRATSSVSSMNWYQQKPGSFPRPWIHATSNLASGVPARFSGSGSGTSYSLTISRVEAEDAATYYCQQWTFNPPTFGAGAKLELK

SEQ ID NO: 2190 - DNA, 318 bp, Artificial Sequence
  source: /note="Description of Artificial Sequence: Synthetic polynucleotide"
caaattgtcctgagccagagcccggctatcctgtccgcctcaccgggcgaaaaggtcaccatgacttgtcgggccacttcctccgtgtcatccatgaactggtaccagcagaagcctggcagcttccctcggccatggattcacgccacgtcaaacctggcatcgggagtgcccgcaaggttctccgggtccggcagcggaacatcctactccctcaccatctcgcgcgtggaagcggaggacgctgccacctactactgccaacagtggaccttcaacccccccacctttggagcgggagccaagctggaacttaag

SEQ ID NO: 2191 - protein, 122 aa, Artificial Sequence
  source: /note="Description of Artificial Sequence: Synthetic polypeptide"
QVQLQQPGAELVKPGASVKMSCKASGYTFTSYNMHWVKQTPGQGLEWIGAIYPGNGDTSYNPKFKGKATLTADKSSRTAYIHLSSLTSEDSVVYYCARSYFYGSSSWYFDVWGAGTTVTVSS

SEQ ID NO: 2192 - DNA, 366 bp, Artificial Sequence
  source: /note="Description of Artificial Sequence: Synthetic polynucleotide"
caagtgcagctgcagcagccgggagcagagctcgtgaagcctggagcctcagtgaagatgagctgcaaggcctccggttacaccttcacctcctacaacatgcactgggtcaagcagacccccggacaaggcctggaatggatcggcgccatctacccgggaaacggggacacctcctataaccccaagttcaagggaaaagcaaccctgaccgcggacaagtccagcagaactgcctacatccatctttcctcgctgacgtccgaggattccgtggtgtactactgtgcccgctcctacttctacgggtcatcctcgtggtacttcgatgtctggggcgctggaaccaccgtgactgtgtcctcc

SEQ ID NO: 2193 - protein, 106 aa, Artificial Sequence
  source: /note="Description of Artificial Sequence: Synthetic polypeptide"
QIILSQSPAILSASPGEKVTLTCRASSSVSSMHWYQQKPGSSPKPWIFATSNLASGVPARFTGSGSGTSYSLTISRVEAEDAATYYCQQWIFNPPTFGGGTSLEIK

SEQ ID NO: 2194 - DNA, 318 bp, Artificial Sequence
  source: /note="Description of Artificial Sequence: Synthetic polynucleotide"
cagatcattctgagccagagcccggccattctgtctgcctcgcctggagaaaaagtcaccctcacttgccgggccagctcctccgtgtcctcaatgcactggtaccagcagaagcctggctcaagcccgaagccctggatcttcgccacctccaatctggcgtcaggagtgcccgcgaggttcactggatcggggtccggcacatcgtattcgctcaccatttcccgggtggaggccgaggacgccgctacttactactgccaacagtggatcttcaacccaccgacctttggcggagggacttccttggaaatcaag

SEQ ID NO: 2195 - protein, 121 aa, Artificial Sequence
  source: /note="Description of Artificial Sequence: Synthetic polypeptide"
QIQLVQSGPELKKPGETVKISCKTSGYTFTSHGINWVKQAPRKGLKWMGWINTYTGEPTYGDDFKGRFAFSLETSARTAYLQINNLKNEDTATYFCARYGNYEEPYAMDYWGQGTSVTVSS

SEQ ID NO: 2196 - DNA, 363 bp, Artificial Sequence
  source: /note="Description of Artificial Sequence: Synthetic polynucleotide"
caaattcagctggtgcagtcgggacctgagctcaagaagcccggagaaaccgtgaagatctcctgcaagacttccgggtacacttttacttcccacggcatcaactgggtcaagcaggcaccaaggaaggggcttaagtggatgggctggattaacacctacaccggcgaacccacctatggcgatgacttcaaaggacggttcgcgttctccctcgaaacctcagcaagaaccgcgtatttgcaaatcaacaacctgaagaacgaggacaccgccacctacttctgcgcccgctacggaaattacgaggaaccttacgctatggactactggggccagggcacttccgtgactgtgtcgtcc

SEQ ID NO: 2197 - DNA, 318 bp, Artificial Sequence
  source: /note="Description of Artificial Sequence: Synthetic polynucleotide"
cagatcgtgctgagccagagccccgccatcctgagcgcttccccgggagaaaaggtcaccatgacttgccgggccactagcagcgtgtcctccatgaactggtaccagcagaagccgggctccttccctcgcccctggattcatgccacctcaaacctggccagcggagtgccagccagattctcgggatctggatcggggacgtcctactccctcaccatctcgcgggtggaggccgaagatgccgccacatactactgtcaacagtggaccttcaacccgccgacctttggagcgggggccaagctggagctgaaa

SEQ ID NO: 2198 - protein, 122 aa, Artificial Sequence
  source: /note="Description of Artificial Sequence: Synthetic polypeptide"
QVQLQQPGAELVKPGASVKMSCKASGYTFTSYNIHWVKQTPGQGLEWIGAIYPGNGDTSYNQKFKGKATLTADKSSTTAFIHFSSLTSEDSVVYYCARSYFYGSDSWYFDVWGAGTTVTVSS

SEQ ID NO: 2199 - DNA, 366 bp, Artificial Sequence
  source: /note="Description of Artificial Sequence: Synthetic polynucleotide"
caagtgcagcttcagcagcctggggccgaactcgtgaagccaggagcctccgtgaagatgtcatgcaaagcctccggctacacttttacctcctacaacattcattgggtcaagcagacacctggccagggcctggaatggattggtgcaatctacccgggcaacggagacacctcgtacaaccagaagtttaaggggaaggccaccctgaccgcggacaagtcaagcactaccgcgttcattcacttctcgtccttgacctccgaggatagcgtggtgtactactgcgcccgctcctatttctacggctccgattcgtggtacttcgacgtctggggagccggaactaccgtgaccgtgtcctcc

SEQ ID NO: 2200 - protein, 106 aa, Artificial Sequence
  source: /note="Description of Artificial Sequence: Synthetic polypeptide"
QIILSQSPAILSASPGEKVTLTCRASSGVPSLHWYQQKPGSSPKPWIFATSNLASGVPARFSGSGSGTSYSLTISRVEAEDAATYYCQQWIFNPPTFGGGTSLEIK

SEQ ID NO: 2201 - DNA, 318 bp, Artificial Sequence
  source: /note="Description of Artificial Sequence: Synthetic polynucleotide"
caaatcatcctgagccagagcccggccatcctgtcggcttcacccggggaaaaggtcacgctgacttgccgggcctcctccggcgtgccaagcctccactggtaccagcaaaagcctggctcgtcccccaaaccctggattttcgccacctccaacctggctagcggagtgccggccagattctcgggttccgggtccggcaccagctattctctcaccatctcccgggtcgaggcggaggacgcagcgacttactactgtcaacagtggatcttcaatccgcccaccttcggcggaggaacttccctggaaatcaag

SEQ ID NO: 2202 - protein, 122 aa, Artificial Sequence
  source: /note="Description of Artificial Sequence: Synthetic polypeptide"
QVQLLQPGAELVKPGASVKMSCKASGYTFTRYNMHWVKQTPGQGLEWIGAIYPGNGDTSYSQKFKGKATLTADKSSSTAYMQLSSLTSEDSAVYYCARSFFYGSSDWYFDVWGAGTTVSVSS

SEQ ID NO: 2203 - DNA, 366 bp, Artificial Sequence
  source: /note="Description of Artificial Sequence: Synthetic polynucleotide"
caagtgcagctgctgcagcccggagccgaactcgtgaagccgggcgcatccgtgaaaatgagctgcaaggcgtccggttacaccttcactcgctacaacatgcactgggtcaagcagacccctggacaaggcctggagtggattggtgctatctacccgggaaacggagacactagctactcgcagaaattcaagggaaaggccacgctgaccgccgataagtcctcctccactgcctacatgcaactcagctcactgacctcagaggactcggccgtgtactactgcgcgaggtccttcttctacgggtcctcggattggtacttcgacgtctggggcgccggtaccaccgtgtccgtgtcatcc

SEQ ID NO: 2204 - protein, 106 aa, Artificial Sequence
  source: /note="Description of Artificial Sequence: Synthetic polypeptide"
QIVLSQSPAILSTSPGEKVTLTCRASSSVNNMHWYQQKPGSSPKPWIYATSNLASGVPSRFSGSGSGTSYSLTISRVEAEDAATYYCQQWIFNPPTFGAGTKLELK

SEQ ID NO: 2205 - DNA, 318 bp, Artificial Sequence
  source: /note="Description of Artificial Sequence: Synthetic polynucleotide"
cagatcgtgctgagccagtccccggcgattctgtccacctcgcctggggaaaaggtcaccctgacatgtagagcctcctcctccgtgaacaatatgcattggtatcagcagaagccaggatcaagccccaagccctggatctatgccacttcgaaccttgcctctggagtgccctcacggttctccggctcgggatcggggaccagctacagcttgactatctcccgggtggaggctgaggacgccgcaacctactactgccagcaatggatcttcaaccctccgacttttggggccggaaccaagctggaactcaag

SEQ ID NO: 2206 - protein, 117 aa, Artificial Sequence
  source: /note="Description of Artificial Sequence: Synthetic polypeptide"
QVQLVESGGGVVQPGRSLRLSCAASGFTFRDYYMAWVRQAPGKGLEWVASISYEGNPYYGDSVKGRFTISRDNAKSTLYLQMSSLRAEDTAVYYCARHDHNNVDWFAYWGQGTLVTV

SEQ ID NO: 2207 - DNA, 357 bp, Artificial Sequence
  source: /note="Description of Artificial Sequence: Synthetic polynucleotide"
caagtgcagttggtggaatcaggaggaggtgtcgtgcaaccaggaagatcattgaggctctcatgcgccgccagcggattcacctttcgggattactacatggcctgggtccgccaggccccggggaagggactggaatgggtggcatccatctcgtacgaagggaacccctactatggggactccgtgaagggacggttcaccatctcccgggacaacgccaagtccaccctgtaccttcaaatgtcctcgctgagggcggaggatactgctgtctactactgtgcccgccacgaccataacaacgtggactggttcgcctactggggccagggaaccctcgtcaccgtgtcctcg

SEQ ID NO: 2208 - protein, 112 aa, Artificial Sequence
  source: /note="Description of Artificial Sequence: Synthetic polypeptide"
DIVMTQTPLSLSVTPGQPVSMSCKSSQSLLYSENKKNYLAWYLQKPGQSPQLLIFWASTRESGVPDRFSGSGSGTDFTLKISRVEAEDVGVYYCQQYYNFPTFGQGTKLEIK

SEQ ID NO: 2209 - DNA, 336 bp, Artificial Sequence
  source: /note="Description of Artificial Sequence: Synthetic polynucleotide"
gacattgtgatgacgcagactcccctgtcgctctccgtgacccctggccagcccgtgtcgatgtcgtgcaagagctcccagtccctgctgtattccgagaacaagaagaattaccttgcgtggtacctccagaagccggggcagagcccgcagctgctgattttctgggcgtccactagagagtctggagtgcctgaccggtttagcggaagcggctccggtactgatttcaccctgaaaatctcgcgcgtggaagctgaggacgtgggcgtgtactactgccagcagtactacaacttccctactttcggacaaggaaccaagctggaaatcaag

SEQ ID NO: 2210 - protein, 251 aa, Artificial Sequence
  source: /note="Description of Artificial Sequence: Synthetic polypeptide"
QVQLVESGGGVVQPGRSLRLSCAASGFTFRDYYMAWVRQAPGKGLEWVASISYEGNPYYGDSVKGRFTISRDNAKSTLYLQMSSLRAEDTAVYYCARHDHNNVDWFAYWGQGTLVTVSSGGGGSGGGGSGGGGSGGGGSDIVMTQTPLSLSVTPGQPVSMSCKSSQSLLYSENKKNYLAWYLQKPGQSPQLLIFWASTRESGVPDRFSGSGSGTDFTLKISRVEAEDVGVYYCQQYYNFPTFGQGTKLEIK

SEQ ID NO: 2211 - protein, 119 aa, Artificial Sequence
  source: /note="Description of Artificial Sequence: Synthetic polypeptide"
QVQLVQSGAEVKKPGASVKVSCKASGFTFRDYYMAWVRQAPGQRLEWMGSISYEGNPYYGDSVKGRVTITRDNSASTLYMELSSLRSEDTAVYYCARHDHNNVDWFAYWGQGTLVTVSS

SEQ ID NO: 2212 - DNA, 357 bp, Artificial Sequence
  source: /note="Description of Artificial Sequence: Synthetic polynucleotide"
caagtccaactcgtccagtccggtgcagaagtcaagaaaccaggagcttccgtgaaagtgtcgtgcaaagcttcaggcttcaccttccgcgactattacatggcctgggtccgccaagcgcccggacagcggctggagtggatggggtccatttcctacgaggggaacccctactatggagattccgtgaagggcagagtgacgatcactcgggataactccgcctccactctctacatggaactgtcctcgcttcggagcgaagataccgcggtgtactactgcgcccgccacgaccataacaacgtggactggttcgcctactggggacaggggaccctcgtgaccgtgtcctct

SEQ ID NO: 2213 - protein, 112 aa, Artificial Sequence
  source: /note="Description of Artificial Sequence: Synthetic polypeptide"
DIQMTQSPSSLSASVGDRVTITCKSSQSLLYSENKKNYLAWYQQKPGKVPKLLIFWASTRESGVPSRFSGSGSGTDFTLTISSLQPEDVATYYCQQYYNFPTFGQGTKLEIK

SEQ ID NO: 2214 - DNA, 336 bp, Artificial Sequence
  source: /note="Description of Artificial Sequence: Synthetic polynucleotide"
gacattcagatgacccagtccccgagctcgctgtccgcctccgtgggagacagagtgacaatcacttgcaagagcagccagtcactgttgtactccgagaacaagaagaactacctcgcctggtaccagcagaagccgggaaaggtccctaagctgctgatcttctgggccagcactagggagtcgggagtgccgtcacggttcagcggatcgggatcgggtaccgacttcaccctgactatctcctccctgcaacctgaggacgtggccacctactactgtcagcagtactacaattttcccaccttcggccagggtaccaagctggaaatcaag

SEQ ID NO: 2215 - protein, 251 aa, Artificial Sequence
  source: /note="Description of Artificial Sequence: Synthetic polypeptide"
QVQLVQSGAEVKKPGASVKVSCKASGFTFRDYYMAWVRQAPGQRLEWMGSISYEGNPYYGDSVKGRVTITRDNSASTLYMELSSLRSEDTAVYYCARHDHNNVDWFAYWGQGTLVTVSSGGGGSGGGGSGGGGSGGGGSDIQMTQSPSSLSASVGDRVTITCKSSQSLLYSENKKNYLAWYQQKPGKVPKLLIFWASTRESGVPSRFSGSGSGTDFTLTISSLQPEDVATYYCQQYYNFPTFGQGTKLEIK

SEQ ID NO: 2216 - protein, 119 aa, Artificial Sequence
  source: /note="Description of Artificial Sequence: Synthetic polypeptide"
EVQLVQSGAEVKKPGESLKISCKGSGFTFRDYYMAWVRQMPGKGLEWMGSISYEGNPYYGDSVKGQVTISRDNSISTLYLQWSSLKASDTAMYYCARHDHNNVDWFAYWGQGTLVTVSS

SEQ ID NO: 2217 - DNA, 357 bp, Artificial Sequence
  source: /note="Description of Artificial Sequence: Synthetic polynucleotide"
gaagtccaactggtgcagtcaggagcagaagtcaaaaaaccaggagaaagcctcaagatcagctgcaagggctcgggtttcaccttccgggactactatatggcctgggtcagacagatgccgggaaagggactggaatggatggggtcaatcagctacgagggcaacccctactacggagactccgtgaagggacaggtcacaatctcccgggacaactcgatttccactctgtatctgcaatggagctccctcaaggcctccgacactgcgatgtactactgtgcgcggcatgaccacaacaatgtggattggttcgcctactggggacagggaaccctcgtgaccgtgtccagc

SEQ ID NO: 2218 - DNA, 336 bp, Artificial Sequence
  source: /note="Description of Artificial Sequence: Synthetic polynucleotide"
gatatccaaatgacccagtcgccctcctcactctccgcctccgtgggagatcgcgtgaccattacttgcaagagctcgcagtccctgctgtactccgagaacaagaagaactacttggcctggtaccagcagaagcccggcaaagtgccgaagctgcttatcttttgggcctcgaccagggaaagcggagtgccgtcacgcttctccggctccgggtctggcaccgacttcactctgactatttcctccctgcaacctgaggacgtggctacctactactgccagcagtactacaacttccctaccttcggccaagggacgaagctggagatcaag

SEQ ID NO: 2219 - protein, 251 aa, Artificial Sequence
  source: /note="Description of Artificial Sequence: Synthetic polypeptide"
EVQLVQSGAEVKKPGESLKISCKGSGFTFRDYYMAWVRQMPGKGLEWMGSISYEGNPYYGDSVKGQVTISRDNSISTLYLQWSSLKASDTAMYYCARHDHNNVDWFAYWGQGTLVTVSSGGGGSGGGGSGGGGSGGGGSDIQMTQSPSSLSASVGDRVTITCKSSQSLLYSENKKNYLAWYQQKPGKVPKLLIFWASTRESGVPSRFSGSGSGTDFTLTISSLQPEDVATYYCQQYYNFPTFGQGTKLEIK

SEQ ID NO: 2220 - DNA, 357 bp, Artificial Sequence
  source: /note="Description of Artificial Sequence: Synthetic polynucleotide"
gaagtgcagttggtccaatcaggcgcagaagtgaagaaacccggagaatcattgaagatttcgtgcaaaggaagcgggttcacattccgcgattactacatggcgtgggtcagacagatgccgggaaagggactcgagtggatggggtccatcagctacgaaggaaacccttactacggggactccgtgaagggccaggtcaccatctcccgcgacaactcaatctccactctgtatctgcaatggtcgagcctcaaggcctctgatactgcgatgtactactgcgctcggcatgaccacaacaacgtggactggttcgcttactggggacagggtacccttgtgaccgtgtcctcc

SEQ ID NO: 2221 - protein, 112 aa, Artificial Sequence
  source: /note="Description of Artificial Sequence: Synthetic polypeptide"
EIVMTQSPATLSLSPGERATLSCKSSQSLLYSENKKNYLAWYQQKPGQAPRLLIFWASTRESGIPARFSGSGSGTDFTLTISSLQPEDLAVYYCQQYYNFPTFGQGTKLEIK

SEQ ID NO: 2222 - DNA, 336 bp, Artificial Sequence
  source: /note="Description of Artificial Sequence: Synthetic polynucleotide"
gagatcgtgatgactcagtcccctgccaccctctcgctgtcccccggggagagggccacgctgtcctgcaagagctcccagtcactgctgtattccgaaaacaagaagaactacctcgcctggtaccaacagaagccgggacaggccccgcggcttctgatcttctgggcctccactcgggagtccggcattccggcccgcttctccggctcggggagcggaactgacttcaccctgaccatcagcagcctgcagccagaggacctcgcagtgtactactgtcaacagtactacaatttccccacctttggccagggtaccaagctggagattaag

SEQ ID NO: 2223 - protein, 251 aa, Artificial Sequence
  source: /note="Description of Artificial Sequence: Synthetic polypeptide"
EVQLVQSGAEVKKPGESLKISCKGSGFTFRDYYMAWVRQMPGKGLEWMGSISYEGNPYYGDSVKGQVTISRDNSISTLYLQWSSLKASDTAMYYCARHDHNNVDWFAYWGQGTLVTVSSGGGGSGGGGSGGGGSGGGGSEIVMTQSPATLSLSPGERATLSCKSSQSLLYSENKKNYLAWYQQKPGQAPRLLIFWASTRESGIPARFSGSGSGTDFTLTISSLQPEDLAVYYCQQYYNFPTFGQGTKLEIK

SEQ ID NO: 2224 - protein, 17 aa, Artificial Sequence
  source: /note="Description of Artificial Sequence: Synthetic peptide"
TISWNSGSIGYADSVKG

SEQ ID NO: 2225 - protein, 13 aa, Artificial Sequence
  source: /note="Description of Artificial Sequence: Synthetic peptide"
DIQYGNYYYGMDV

SEQ ID NO: 2226 - protein, 7 aa, Artificial Sequence
  source: /note="Description of Artificial Sequence: Synthetic peptide"
GFTFNDY

SEQ ID NO: 2227 - protein, 6 aa, Artificial Sequence
  source: /note="Description of Artificial Sequence: Synthetic peptide"
SWNSGS

SEQ ID NO: 2228 - protein, 8 aa, Artificial Sequence
  source: /note="Description of Artificial Sequence: Synthetic peptide"
GFTFNDYA

SEQ ID NO: 2229 - protein, 8 aa, Artificial Sequence
  source: /note="Description of Artificial Sequence: Synthetic peptide"
ISWNSGSI

SEQ ID NO: 2230 - protein, 15 aa, Artificial Sequence
  source: /note="Description of Artificial Sequence: Synthetic peptide"
AKDIQYGNYYYGMDV

SEQ ID NO: 2231 - protein, 122 aa, Artificial Sequence
  source: /note="Description of Artificial Sequence: Synthetic polypeptide"
EVQLVESGGGLVQPGRSLRLSCAASGFTFNDYAMHWVRQAPGKGLEWVSTISWNSGSIGYADSVKGRFTISRDNAKKSLYLQMNSLRAEDTALYYCAKDIQYGNYYYGMDVWGQGTTVTVSS

SEQ ID NO: 2232 - DNA, 366 bp, Artificial Sequence
  source: /note="Description of Artificial Sequence: Synthetic polynucleotide"
gaggtgcagctggtcgagtcggggggaggattggtgcagccgggcagaagcctgcggctctcatgtgccgcctccggcttcacctttaacgactacgcaatgcactgggtcagacaggctcctgggaagggcctggaatgggtgtccaccatttcctggaactccgggagcatcggctacgctgactccgtgaagggccgcttcacgattagccgcgataacgcgaaaaagagcctgtacctccaaatgaactccctgcgggccgaagataccgccctttactactgcgcgaaggacattcagtatggaaactactactacggaatggacgtctggggacaggggaccacagtgaccgtgtcaagc

SEQ ID NO: 2233 - protein, 11 aa, Artificial Sequence
  source: /note="Description of Artificial Sequence: Synthetic peptide"
RASQSVSSYLA

SEQ ID NO: 2234 - protein, 9 aa, Artificial Sequence
  source: /note="Description of Artificial Sequence: Synthetic peptide"
QQRSNWPIT

SEQ ID NO: 2235 - protein, 7 aa, Artificial Sequence
  source: /note="Description of Artificial Sequence: Synthetic peptide"
SQSVSSY

SEQ ID NO: 2236 - protein, 3 aa, Artificial Sequence
  source: /note="Description of Artificial Sequence: Synthetic peptide"
DAS

SEQ ID NO: 2237 - protein, 6 aa, Artificial Sequence
  source: /note="Description of Artificial Sequence: Synthetic peptide"
RSNWPI

SEQ ID NO: 2238 - protein, 6 aa, Artificial Sequence
  source: /note="Description of Artificial Sequence: Synthetic peptide"
QSVSSY

SEQ ID NO: 2239 - protein, 107 aa, Artificial Sequence
  source: /note="Description of Artificial Sequence: Synthetic polypeptide"
EIVLTQSPATLSLSPGERATLSCRASQSVSSYLAWYQQKPGQAPRLLIYDASNRATGIPARFSGSGSGTDFTLTISSLEPEDFAVYYCQQRSNWPITFGQGTRLEIK

SEQ ID NO: 2240 - DNA, 321 bp, Artificial Sequence
  source: /note="Description of Artificial Sequence: Synthetic polynucleotide"
gaaatcgtgctgacccagagcccagccactttgtcactgtcccccggcgaaagagccactctgtcctgccgggcatcgcagtccgtgtcgtcctacctggcctggtaccagcaaaagcccggacaagcccctcgccttctcatctacgacgcctccaatcgcgcgaccggaatcccggccaggttctccgggagcggttcaggcactgacttcaccctgaccatctcgtccctggagccggaggatttcgccgtgtattactgccagcagcggtccaactggcccatcaccttcggccaagggactcggctcgaaatcaag

SEQ ID NO: 2241 - protein, 249 aa, Artificial Sequence
  source: /note="Description of Artificial Sequence: Synthetic polypeptide"
EVQLVESGGGLVQPGRSLRLSCAASGFTFNDYAMHWVRQAPGKGLEWVSTISWNSGSIGYADSVKGRFTISRDNAKKSLYLQMNSLRAEDTALYYCAKDIQYGNYYYGMDVWGQGTTVTVSSGGGGSGGGGSGGGGSGGGGSEIVLTQSPATLSLSPGERATLSCRASQSVSSYLAWYQQKPGQAPRLLIYDASNRATGIPARFSGSGSGTDFTLTISSLEPEDFAVYYCQQRSNWPITFGQGTRLEIK

SEQ ID NO: 2242 - DNA, 747 bp, Artificial Sequence
  source: /note="Description of Artificial Sequence: Synthetic polynucleotide"
gaggtgcagctggtcgagtcggggggaggattggtgcagccgggcagaagcctgcggctctcatgtgccgcctccggcttcacctttaacgactacgcaatgcactgggtcagacaggctcctgggaagggcctggaatgggtgtccaccatttcctggaactccgggagcatcggctacgctgactccgtgaagggccgcttcacgattagccgcgataacgcgaaaaagagcctgtacctccaaatgaactccctgcgggccgaagataccgccctttactactgcgcgaaggacattcagtatggaaactactactacggaatggacgtctggggacaggggaccacagtgaccgtgtcaagcggcggtggaggatctggcggaggaggttccggtggcggtggatcgggagggggaggatcggaaatcgtgctgacccagagcccagccactttgtcactgtcccccggcgaaagagccactctgtcctgccgggcatcgcagtccgtgtcgtcctacctggcctggtaccagcaaaagcccggacaagcccctcgccttctcatctacgacgcctccaatcgcgcgaccggaatcccggccaggttctccgggagcggttcaggcactgacttcaccctgaccatctcgtccctggagccggaggatttcgccgtgtattactgccagcagcggtccaactggcccatcaccttcggccaagggactcggctcgaaatcaag

SEQ ID NO: 2243 - protein, 119 aa, Artificial Sequence
  source: /note="Description of Artificial Sequence: Synthetic polypeptide"
EVQLVESGGGLVQPGRSLKLSCAASGFTFRDYYMAWVRQAPKKGLEWVASISYEGNPYYGDSVKGRFTISRNNAKSTLYLQMNSLRSEDTATYYCARHDHNNVDWFAYWGQGTLVTVSS

SEQ ID NO: 2244 - protein, 112 aa, Artificial Sequence
  source: /note="Description of Artificial Sequence: Synthetic polypeptide"
DIVMTQTPSSQAVSAGEKVTMSCKSSQSLLYSENKKNYLAWYQQKPGQSPKLLIFWASTRESGVPDRFIGSGSGTDFTLTISSVQAEDLAVYYCQQYYNFPTFGSGTKLEIK

SEQ ID NO: 2245 - protein, 251 aa, Artificial Sequence
  source: /note="Description of Artificial Sequence: Synthetic polypeptide"
EVQLVESGGGLVQPGRSLKLSCAASGFTFRDYYMAWVRQAPKKGLEWVASISYEGNPYYGDSVKGRFTISRNNAKSTLYLQMNSLRSEDTATYYCARHDHNNVDWFAYWGQGTLVTVSSGGGGSGGGGSGGGGSGGGGSDIVMTQTPSSQAVSAGEKVTMSCKSSQSLLYSENKKNYLAWYQQKPGQSPKLLIFWASTRESGVPDRFIGSGSGTDFTLTISSVQAEDLAVYYCQQYYNFPTFGSGTKLEIK

SEQ ID NO: 2246 - protein, 122 aa, Artificial Sequence
  source: /note="Description of Artificial Sequence: Synthetic polypeptide"
EVQLQQSGAELVKPGASVKMSCKASGYTFTSYNMHWVKQTPGQGLEWIGAIYPGNGDTSYNQKFKGKATLTADKSSSTAYMQLSSLTSEDSADYYCARSNYYGSSYWFFDVWGAGTTVTVSS

SEQ ID NO: 2247 - DNA, 366 bp, Artificial Sequence
  source: /note="Description of Artificial Sequence: Synthetic polynucleotide"
gaggtgcaactgcagcagtcaggagcagaactggtcaagccgggcgcatccgtcaagatgagctgcaaggcctcaggatacaccttcacttcatacaacatgcactgggtcaagcagacgcctgggcaggggctggagtggatcggtgccatctaccccggaaacggcgacacctcctacaaccagaagttcaagggaaaggccaccctcaccgctgataagtccagcagcaccgcctacatgcaactgtcgtccctgacttcggaggacagcgctgactactattgcgcccgctctaattactacggttcctcctactggttcttcgacgtgtggggcgcgggtaccactgtgactgtctccagc

SEQ ID NO: 2248 - protein, 106 aa, Artificial Sequence
  source: /note="Description of Artificial Sequence: Synthetic polypeptide"
DIVLTQSPAILSASPGEKVTMTCRASSSVNYMDWYQKKPGSSPKPWIYATSNLASGVPARFSGSGSGTSYSLTISRVEAEDAATYYCQQWSFNPPTFGGGTKLEIK

SEQ ID NO: 2249 - DNA, 318 bp, Artificial Sequence
  source: /note="Description of Artificial Sequence: Synthetic polynucleotide"
gacatcgtgctcactcagtcgcccgccattctgagcgctagccccggcgaaaaggtcaccatgacctgtagagcgtcatcctcggtgaactacatggactggtaccagaagaagccgggatcgagccctaagccatggatctacgccacatccaatctggcgtccggcgtgccggcccggttcagcgggagcggctcaggcacctcctattccctcaccatctcgagagtggaggctgaggatgcagccacgtactactgtcagcagtggtcgttcaaccccccaacctttggtggtggaaccaagctggaaatcaag

SEQ ID NO: 2250 - protein, 18 aa, Artificial Sequence
  source: /note="Description of Artificial Sequence: Synthetic peptide"
GSTSGGGSGGGSGGGGSS

SEQ ID NO: 2251 - protein, 246 aa, Artificial Sequence
  source: /note="Description of Artificial Sequence: Synthetic polypeptide"
DIVLTQSPAILSASPGEKVTMTCRASSSVNYMDWYQKKPGSSPKPWIYATSNLASGVPARFSGSGSGTSYSLTISRVEAEDAATYYCQQWSFNPPTFGGGTKLEIKGSTSGGGSGGGSGGGGSSEVQLQQSGAELVKPGASVKMSCKASGYTFTSYNMHWVKQTPGQGLEWIGAIYPGNGDTSYNQKFKGKATLTADKSSSTAYMQLSSLTSEDSADYYCARSNYYGSSYWFFDVWGAGTTVTVSS

SEQ ID NO: 2252 - DNA, 738 bp, Artificial Sequence
  source: /note="Description of Artificial Sequence: Synthetic polynucleotide"
gacatcgtgctcactcagtcgcccgccattctgagcgctagccccggcgaaaaggtcaccatgacctgtagagcgtcatcctcggtgaactacatggactggtaccagaagaagccgggatcgagccctaagccatggatctacgccacatccaatctggcgtccggcgtgccggcccggttcagcgggagcggctcaggcacctcctattccctcaccatctcgagagtggaggctgaggatgcagccacgtactactgtcagcagtggtcgttcaaccccccaacctttggtggtggaaccaagctggaaatcaagggaagcacctccggcggaggttccggaggagggtccggaggcggaggcagctccgaggtgcaactgcagcagtcaggagcagaactggtcaagccgggcgcatccgtcaagatgagctgcaaggcctcaggatacaccttcacttcatacaacatgcactgggtcaagcagacgcctgggcaggggctggagtggatcggtgccatctaccccggaaacggcgacacctcctacaaccagaagttcaagggaaaggccaccctcaccgctgataagtccagcagcaccgcctacatgcaactgtcgtccctgacttcggaggacagcgctgactactattgcgcccgctctaattactacggttcctcctactggttcttcgacgtgtggggcgcgggtaccactgtgactgtctccagc

SEQ ID NO: 2253 - protein, 253 aa, Homo sapiens
EVQLQQSGPGLVKPSQTLSLTCAISGDSMLSNSDTWNWIRQSPSRGLEWLGRTYHRSTWYDDYASSVRGRVSINVDTSKNQYSLQLNAVTPEDTGVYYCARVRLQDGNSWSDAFDVWGQGTMVTVSSGGGGSGGGGSGGGGSQSALTQPASASGSPGQSVTISCTGTSSDVGGYNYVSWYQQHPGKAPKLMIYDVSNRPSGVSNRFSGSKSGNTASLTISGLQAEDEADYYCSSYTSSSTLYVFGTGTQLTVL

SEQ ID NO: 2254 - protein, 127 aa, Homo sapiens
EVQLQQSGPGLVKPSQTLSLTCAISGDSMLSNSDTWNWIRQSPSRGLEWLGRTYHRSTWYDDYASSVRGRVSINVDTSKNQYSLQLNAVTPEDTGVYYCARVRLQDGNSWSDAFDVWGQGTMVTVSS

SEQ ID NO: 2255 - protein, 111 aa, Homo sapiens
QSALTQPASASGSPGQSVTISCTGTSSDVGGYNYVSWYQQHPGKAPKLMIYDVSNRPSGVSNRFSGSKSGNTASLTISGLQAEDEADYYCSSYTSSSTLYVFGTGTQLTVL

SEQ ID NO: 2256 - protein, 12 aa, Artificial Sequence
  source: /note="Description of Artificial Sequence: Synthetic peptide"
GDSMLSNSDTWN

SEQ ID NO: 2257 - protein, 7 aa, Artificial Sequence
  source: /note="Description of Artificial Sequence: Synthetic peptide"
SNSDTWN

SEQ ID NO: 2258 - protein, 18 aa, Artificial Sequence
  source: /note="Description of Artificial Sequence: Synthetic peptide"
RTYHRSTWYDDYASSVRG

SEQ ID NO: 2259 - protein, 15 aa, Artificial Sequence
  source: /note="Description of Artificial Sequence: Synthetic peptide"
VRLQDGNSWSDAFDV

SEQ ID NO: 2260 - protein, 14 aa, Artificial Sequence
  source: /note="Description of Artificial Sequence: Synthetic peptide"
TGTSSDVGGYNYVS

SEQ ID NO: 2261 - protein, 7 aa, Artificial Sequence
  source: /note="Description of Artificial Sequence: Synthetic peptide"
DVSNRPS

SEQ ID NO: 2262 - protein, 11 aa, Artificial Sequence
  source: /note="Description of Artificial Sequence: Synthetic peptide"
SSYTSSSTLYV

SEQ ID NO: 2263 - protein, 18 aa, Artificial Sequence
  source: /note="Description of Artificial Sequence: Synthetic peptide"
GSTSGSGKPGSGEGSTKG

SEQ ID NO: 2264 - protein, 7 aa, Artificial Sequence
  source: /note="Description of Artificial Sequence: Synthetic peptide"
LAEAAAK

SEQ ID NO: 2265 - protein, 487 aa, Homo sapiens
MSLPPIRLPSPYGSDRLVQLAARLRPALCDTLITVGSQEFPAHSLVLAGVSQQLGRRGQWALGEGISPSTFAQLLNFVYGESVELQPGELRPLQEAARALGVQSLEEACWRARGDRAKKPDPGLKKHQEEPEKPSRNPERELGDPGEKQKPEQVSRTGGREQEMLHKHSPPRGRPEMAGATQEAQQEQTRSKEKRLQAPVGQRGADGKHGVLTWLRENPGGSEESLRKLPGPLPPAGSLQTSVTPRPSWAEAPWLVGGQPALWSILLMPPRYGIPFYHSTPTTGAWQEVWREQRIPLSLNAPKGLWSQNQLASSSPTPGSLPQGPAQLSPGEMEESDQGHTGALATCAGHEDKAGCPPRPHPPPAPPARSRPYACSVCGKRFSLKHQMETHYRVHTGEKPFSCSLCPQRSRDFSAMTKHLRTHGAAPYRCSLCGAGCPSLASMQAHMRGHSPSQLPPGWTIRSTFLYSSSRPSRPSTSPCCPSSSTT

SEQ ID NO: 2266 - DNA, 2037 bp, Homo sapiens
actcggccttaagccgtcctgggtgtatgtgaggctgaaagggaaggaggaacagggtctgggccgctgtgtgctctgccgtcatctctaagaaacaaccataccactgaatgctactgtgtacttacaaaccacactcatattcgtcacgtcatttcatcttcacccccacctccaaatgaggcttgaaatgagatgagatgttcctccctcccctttcaaccatggacctcacactgtggacttcctcttagagcctctgagttaggtacccaagccaaggcacaatgtccctgccccccataagactgcccagcccctatggctctgatcggctggtacagctagcagccaggctccggccagcactctgtgatactctgatcaccgtagggagccaggagttccccgcccacagcctggtgctagcaggtgtcagccagcagctgggccgcaggggccagtgggctctgggagaaggcatcagcccttctacctttgcccagctcctgaactttgtgtatggggagagtgtagagctgcagcctggagagctaaggccccttcaggaggcggccagggccttgggagtgcagtccctggaagaggcatgctggagggctcgaggggacagggctaaaaagccagatccaggcctgaagaaacatcaggaggagccagagaaaccctcaaggaatcctgagagagaactgggggaccctggagagaagcagaaaccagaacaggtttctagaactggtgggagagaacaggagatgttgcacaagcactcgccaccaagaggcagacccgagatggcaggagcaacgcaggaggctcagcaggaacagaccaggtcaaaggagaaacgcctccaagcccctgttggccaaaggggagcagatgggaagcatggagtgctcacgtggttgagggaaaatccagggggctctgaggaaagtctgcgcaagctccctggcccccttcccccagcaggctccctgcaaaccagcgtcacccctaggccctcgtgggctgaggccccttggttggtggggggccagcctgccctgtggagcatcctgctgatgccgcccagatatggcattcccttctaccatagcacccccaccactggagcctggcaggaggtctggcgggaacagaggatcccactgtccctaaatgcccccaaagggctctggagccagaaccagttggcctcctccagccctaccccaggttccctcccccagggccccgcacagctcagccctggggagatggaagagtctgatcaggggcacacaggcgcacttgcaacctgtgcgggtcatgaggacaaggcaggctgcccacctcgcccgcaccctcccccggcccctcctgctcggtctcggccctatgcgtgctctgtctgtggaaagaggttttcactcaagcatcagatggagacgcactaccgagtccacacaggagagaagcccttctcctgtagcctttgtcctcagcgctcccgggacttctcggccatgaccaagcacctgcggacacacggggccgctccgtaccgctgctccctgtgcggggccggctgtcccagcctggcctccatgcaggcgcacatgcgcggtcactcgcccagccaactcccgcccggatggaccatccgctccaccttcctctactcctcctcgaggccgtctcggccctcgacctctccctgttgtccttcttcctccaccacctgacggggtgtcggtagcgtcttagccaagagtccaattaaagaacgaaaagcgggccggctcggcttctgacctggcaccgctgctacggcggcctagcaaattccgccccagaagcgccccaggaagggcgccgagtgccctctcctggacgatcgcgggtcgcagaagcccaggccagcgagccctacagagtgaggacactgaagtgtgcaggagcgaaggttaacagtaggggagattgtcgatctcatcaccataataaagagtttcctgtgccctcccttca

SEQ ID NO: 2267 - protein, 210 aa, Homo sapiens
MSTPTTGAWQEVWREQRIPLSLNAPKGLWSQNQLASSSPTPGSLPQGPAQLSPGEMEESDQGHTGALATCAGHEDKAGCPPRPHPPPAPPARSRPYACSVCGKRFSLKHQMETHYRVHTGEKPFSCSLCPQRSRDFSAMTKHLRTHGAAPYRCSLCGAGCPSLASMQAHMRGHSPSQLPPGWTIRSTFLYSSSRPSRPSTSPCCPSSSTT

SEQ ID NO: 2268 - DNA, 1097 bp, Homo sapiens
actcggccttaagccgtcctgggtgtatgtgaggctgaaagggaaggaggaacagggtctgggccgctgtgtgctctgccgtcatctctaagaaacaaccataccactgaatgctactgtgtacttacaaaccacactcatattcgtcacgtcatttcatcttcacccccacctccaaatgagcacccccaccactggagcctggcaggaggtctggcgggaacagaggatcccactgtccctaaatgcccccaaagggctctggagccagaaccagttggcctcctccagccctaccccaggttccctcccccagggccccgcacagctcagccctggggagatggaagagtctgatcaggggcacacaggcgcacttgcaacctgtgcgggtcatgaggacaaggcaggctgcccacctcgcccgcaccctcccccggcccctcctgctcggtctcggccctatgcgtgctctgtctgtggaaagaggttttcactcaagcatcagatggagacgcactaccgagtccacacaggagagaagcccttctcctgtagcctttgtcctcagcgctcccgggacttctcggccatgaccaagcacctgcggacacacggggccgctccgtaccgctgctccctgtgcggggccggctgtcccagcctggcctccatgcaggcgcacatgcgcggtcactcgcccagccaactcccgcccggatggaccatccgctccaccttcctctactcctcctcgaggccgtctcggccctcgacctctccctgttgtccttcttcctccaccacctgacggggtgtcggtagcgtcttagccaagagtccaattaaagaacgaaaagcgggccggctcggcttctgacctggcaccgctgctacggcggcctagcaaattccgccccagaagcgccccaggaagggcgccgagtgccctctcctggacgatcgcgggtcgcagaagcccaggccagcgagccctacagagtgaggacactgaagtgtgcaggagcgaaggttaacagtaggggagattgtcgatctcatcaccataataaagagtttcctgtgccctcccttca

SEQ ID NO: 2269 - protein, 155 aa, Homo sapiens
MEESDQGHTGALATCAGHEDKAGCPPRPHPPPAPPARSRPYACSVCGKRFSLKHQMETHYRVHTGEKPFSCSLCPQRSRDFSAMTKHLRTHGAAPYRCSLCGAGCPSLASMQAHMRGHSPSQLPPGWTIRSTFLYSSSRPSRPSTSPCCPSSSTT

SEQ ID NO: 2270 - DNA, 1023 bp, Homo sapiens
actcggccttaagccgtcctgggtgtatgtgaggctgaaagggaaggaggaacagggtctgggccgctgtgtgctctgccgtcatctctaagaaacaaccataccactgaatgctactgtgtacttacaaaccacactcatattcgtcacgtcatttcatcttcacccccacctccaaatgagcacccccaccactggagcctggcaggaggtctggcgggaacagaggttccctcccccagggccccgcacagctcagccctggggagatggaagagtctgatcaggggcacacaggcgcacttgcaacctgtgcgggtcatgaggacaaggcaggctgcccacctcgcccgcaccctcccccggcccctcctgctcggtctcggccctatgcgtgctctgtctgtggaaagaggttttcactcaagcatcagatggagacgcactaccgagtccacacaggagagaagcccttctcctgtagcctttgtcctcagcgctcccgggacttctcggccatgaccaagcacctgcggacacacggggccgctccgtaccgctgctccctgtgcggggccggctgtcccagcctggcctccatgcaggcgcacatgcgcggtcactcgcccagccaactcccgcccggatggaccatccgctccaccttcctctactcctcctcgaggccgtctcggccctcgacctctccctgttgtccttcttcctccaccacctgacggggtgtcggtagcgtcttagccaagagtccaattaaagaacgaaaagcgggccggctcggcttctgacctggcaccgctgctacggcggcctagcaaattccgccccagaagcgccccaggaagggcgccgagtgccctctcctggacgatcgcgggtcgcagaagcccaggccagcgagccctacagagtgaggacactgaagtgtgcaggagcgaaggttaacagtaggggagattgtcgatctcatcaccataataaagagtttcctgtgccctcccttca

SEQ ID NO: 2271-2999 - skipped (729 entries)

SEQ ID NO: 3000 - protein, 5 aa, Artificial Sequence
  source: /note="Description of Artificial Sequence: Synthetic peptide"
  source: /note="See specification as filed for detailed description of substitutions and preferred embodiments"
GGGGS

SEQ ID NO: 3001 - protein, 20 aa, Artificial Sequence
  source: /note="Description of Artificial Sequence: Synthetic peptide"
GGGGSGGGGSGGGGSGGGGS

SEQ ID NO: 3002 - protein, 15 aa, Artificial Sequence
  source: /note="Description of Artificial Sequence: Synthetic peptide"
GGGGSGGGGSGGGGS

SEQ ID NO: 3003 - protein, 284 aa, Homo sapiens
NWVNVISDLKKIEDLIQSMHIDATLYTESDVHPSCKVTAMKCFLLELQVISLESGDASIHDTVENLIILANNSLSSNGNVTESGCKECEELEEKNIKEFLQSFVHIVQMFINTSITCPPPMSVEHADIWVKSYSLYSRERYICNSGFKRKAGTSSLTECVLNKATNVAHWTTPSLKCIRDPALVHQRPAPPSTVTTAGVTPQPESLSPSGKEPAASSPSSNNTAATTAAIVPGSQLMPSKSPSTGTTEISSHESSHGTPSQTTAKNWELTASASHQPPGVYPQG

SEQ ID NO: 3004 - DNA, 20 bp, Artificial Sequence
  source: /note="Description of Artificial Sequence: Synthetic oligonucleotide"
ccagccgatcagagccatag

SEQ ID NO: 3005 - DNA, 20 bp, Artificial Sequence
  source: /note="Description of Artificial Sequence: Synthetic oligonucleotide"
gctctggagccagaaccagt

SEQ ID NO: 3006 - DNA, 21 bp, Artificial Sequence
  source: /note="Description of Artificial Sequence: Synthetic oligonucleotide"
ccacaggcttgaaatgagatg

SEQ ID NO: 3007 - DNA, 20 bp, Artificial Sequence
  source: /note="Description of Artificial Sequence: Synthetic oligonucleotide"
catacacaaagttcaggagc

SEQ ID NO: 3008 - DNA, 20 bp, Artificial Sequence
  source: /note="Description of Artificial Sequence: Synthetic oligonucleotide"
gacaagaagctgctgccaca

SEQ ID NO: 3009 - DNA, 20 bp, Artificial Sequence
  source: /note="Description of Artificial Sequence: Synthetic oligonucleotide"
ggaacctggaaggaacagtg

SEQ ID NO: 3010 - DNA, 20 bp, Artificial Sequence
  source: /note="Description of Artificial Sequence: Synthetic oligonucleotide"
atttccattctctcgccacc

SEQ ID NO: 3011 - DNA, 20 bp, Artificial Sequence
  source: /note="Description of Artificial Sequence: Synthetic oligonucleotide"
ctgggcaaaggtagaagggc

SEQ ID NO: 3012 - DNA, 20 bp, Artificial Sequence
  source: /note="Description of Artificial Sequence: Synthetic oligonucleotide"
ggtctagtgctctgcctcca

SEQ ID NO: 3013 - DNA, 21 bp, Artificial Sequence
  source: /note="Description of Artificial Sequence: Synthetic oligonucleotide"
gcgccaactcactgtaccatt

SEQ ID NO: 3014 - DNA, 20 bp, Artificial Sequence
  source: /note="Description of Artificial Sequence: Synthetic oligonucleotide"
gtagcgaacgtgtccggcgt

SEQ ID NO: 3015 - protein, 13 aa, Artificial Sequence
  source: /note="Description of Artificial Sequence: Synthetic peptide"
HAYGHDGGFAMDY

SEQ ID NO: 3016 - protein, 11 aa, Artificial Sequence
  source: /note="Description of Artificial Sequence: Synthetic peptide"
RASESVSSNVA

SEQ ID NO: 3017 - protein, 7 aa, Artificial Sequence
  source: /note="Description of Artificial Sequence: Synthetic peptide"
SESVSSN

SEQ ID NO: 3018 - protein, 17 aa, Artificial Sequence
  source: /note="Description of Artificial Sequence: Synthetic peptide"
NIYPGTGGSNFDEKFKN

SEQ ID NO: 3019 - protein, 8 aa, Artificial Sequence
  source: /note="Description of Artificial Sequence: Synthetic peptide"
WTTGTGAY

SEQ ID NO: 3020 - protein, 7 aa, Artificial Sequence
  source: /note="Description of Artificial Sequence: Synthetic peptide"
GYTFTTY

SEQ ID NO: 3021 - protein, 6 aa, Artificial Sequence
  source: /note="Description of Artificial Sequence: Synthetic peptide"
YPGTGG

SEQ ID NO: 3022 - RNA, 42 nt, Artificial Sequence
  source: /note="Description of Artificial Sequence: Synthetic oligonucleotide"
  modified_base (1)..(20): a, c, u, g, unknown or other
nnnnnnnnnnnnnnnnnnnnguuuuagagcuaugcuguuuug

SEQ ID NO: 3023 - DNA, 660 bp, Artificial Sequence
  source: /note="Description of Artificial Sequence: Synthetic polynucleotide"
gagatcgtcctgactcagtcacccgctaccctgagcctgagccctggcgagcgggctacactgagctgtaaatctagtcagtcactgctggatagcggtaatcagaagaacttcctgacctggtatcagcagaagcccggtaaagcccctaagctgctgatctactgggcctctactagagaatcaggcgtgccctctaggtttagcggtagcggtagtggcaccgacttcaccttcactatctctagcctgcagcccgaggatatcgctacctactactgtcagaacgactatagctacccctacaccttcggtcaaggcactaaggtcgagattaagcgtacggtggccgctcccagcgtgttcatcttcccccccagcgacgagcagctgaagagcggcaccgccagcgtggtgtgcctgctgaacaacttctacccccgggaggccaaggtgcagtggaaggtggacaacgccctgcagagcggcaacagccaggagagcgtcaccgagcaggacagcaaggactccacctacagcctgagcagcaccctgaccctgagcaaggccgactacgagaagcataaggtgtacgcctgcgaggtgacccaccagggcctgtccagccccgtgaccaagagcttcaacaggggcgagtgc

SEQ ID NO: 3024 - RNA, 86 nt, Artificial Sequence
  source: /note="Description of Artificial Sequence: Synthetic oligonucleotide"
  variation (80)..(86): /replace=" "
  SITE (1)..(86): /note="Variant nucleotides given in the sequence have no preference with respect to those in the annotations for variant positions"
  source: /note="See specification as filed for detailed description of substitutions and preferred embodiments"
aacuuaccaaggaacagcauagcaaguuaaaauaaggcuaguccguuaucaacuugaaaaaguggcaccgagucggugcuuuuuuu

SEQ ID NO: 3025 - protein, 113 aa, Artificial Sequence
  source: /note="Description of Artificial Sequence: Synthetic polypeptide"
EIVLTQSPATLSLSPGERATLSCKSSQSLLDSGNQKNFLTWYQQKPGQAPRLLIYWASTRESGVPSRFSGSGSGTDFTFTISSLEAEDAATYYCQNDYSYPYTFGQGTKVEIK

SEQ ID NO: 3026 - RNA, 74 nt, Artificial Sequence
  source: /note="Description of Artificial Sequence: Synthetic oligonucleotide"
  variation (68)..(74): /replace=" "
  SITE (1)..(74): /note="Variant nucleotides given in the sequence have no preference with respect to those in the annotations for variant positions"
  source: /note="See specification as filed for detailed description of substitutions and preferred embodiments"
aacagcauagcaaguuaaaauaaggcuaguccguuaucaacuugaaaaaguggcaccgagucggugcuuuuuuu

SEQ ID NO: 3027 - DNA, 339 bp, Artificial Sequence
  source: /note="Description of Artificial Sequence: Synthetic polynucleotide"
gagatcgtcctgactcagtcacccgctaccctgagcctgagccctggcgagcgggctacactgagctgtaaatctagtcagtcactgctggatagcggtaatcagaagaacttcctgacctggtatcagcagaagcccggtcaagcccctagactgctgatctactgggcctctactagagaatcaggcgtgccctctaggtttagcggtagcggtagtggcaccgacttcaccttcactatctctagcctggaagccgaggacgccgctacctactactgtcagaacgactatagctacccctacaccttcggtcaaggcactaaggtcgagattaag

SEQ ID NO: 3028 - RNA, 102 nt, Artificial Sequence
  source: /note="Description of Artificial Sequence: Synthetic polynucleotide"
  modified_base (1)..(19): a, c, u, g, unknown or other
  variation (96)..(102): /replace=" "
  SITE (1)..(102): /note="Variant nucleotides given in the sequence have no preference with respect to those in the annotations for variant positions"
  source: /note="See specification as filed for detailed description of substitutions and preferred embodiments"
nnnnnnnnnnnnnnnnnnnguuuuagagcuagaaauagcaaguuaaaauaaggcuaguccguuaucaacuugaaaaaguggcaccgagucggugcuuuuuuu

SEQ ID NO: 3029 - protein, 220 aa, Artificial Sequence
  source: /note="Description of Artificial Sequence: Synthetic polypeptide"
EIVLTQSPATLSLSPGERATLSCKSSQSLLDSGNQKNFLTWYQQKPGQAPRLLIYWASTRESGVPSRFSGSGSGTDFTFTISSLEAEDAATYYCQNDYSYPYTFGQGTKVEIKRTVAAPSVFIFPPSDEQLKSGTASVVCLLNNFYPREAKVQWKVDNALQSGNSQESVTEQDSKDSTYSLSSTLTLSKADYEKHKVYACEVTHQGLSSPVTKSFNRGEC

SEQ ID NO: 3030 - DNA, 660 bp, Artificial Sequence
  source: /note="Description of Artificial Sequence: Synthetic polynucleotide"
gagatcgtcctgactcagtcacccgctaccctgagcctgagccctggcgagcgggctacactgagctgtaaatctagtcagtcactgctggatagcggtaatcagaagaacttcctgacctggtatcagcagaagcccggtcaagcccctagactgctgatctactgggcctctactagagaatcaggcgtgccctctaggtttagcggtagcggtagtggcaccgacttcaccttcactatctctagcctggaagccgaggacgccgctacctactactgtcagaacgactatagctacccctacaccttcggtcaaggcactaaggtcgagattaagcgtacggtggccgctcccagcgtgttcatcttcccccccagcgacgagcagctgaagagcggcaccgccagcgtggtgtgcctgctgaacaacttctacccccgggaggccaaggtgcagtggaaggtggacaacgccctgcagagcggcaacagccaggagagcgtcaccgagcaggacagcaaggactccacctacagcctgagcagcaccctgaccctgagcaaggccgactacgagaagcataaggtgtacgcctgcgaggtgacccaccagggcctgtccagccccgtgaccaagagcttcaacaggggcgagtgc

SEQ ID NO: 3031 - DNA, 15 bp, Artificial Sequence
  source: /note="Description of Artificial Sequence: Synthetic oligonucleotide"
acctactggatgcac

SEQ ID NO: 3032 - DNA, 51 bp, Artificial Sequence
  source: /note="Description of Artificial Sequence: Synthetic oligonucleotide"
aatatctaccccggcaccggcggctctaacttcgacgagaagtttaagaat

SEQ ID NO: 3033 - DNA, 24 bp, Artificial Sequence
  source: /note="Description of Artificial Sequence: Synthetic oligonucleotide"
tggactaccggcacaggcgcctac

SEQ ID NO: 3034 - DNA, 21 bp, Artificial Sequence
  source: /note="Description of Artificial Sequence: Synthetic oligonucleotide"
ggctacaccttcactacctac

SEQ ID NO: 3035 - DNA, 18 bp, Artificial Sequence
  source: /note="Description of Artificial Sequence: Synthetic oligonucleotide"
taccccggcaccggcggc

SEQ ID NO: 3036 - DNA, 51 bp, Artificial Sequence
  source: /note="Description of Artificial Sequence: Synthetic oligonucleotide"
aaatctagtcagtcactgctggatagcggtaatcagaagaacttcctgacc

SEQ ID NO: 3037 - DNA, 21 bp, Artificial Sequence
  source: /note="Description of Artificial Sequence: Synthetic oligonucleotide"
tgggcctctactagagaatca

SEQ ID NO: 3038 - DNA, 27 bp, Artificial Sequence
  source: /note="Description of Artificial Sequence: Synthetic oligonucleotide"
cagaacgactatagctacccctacacc

SEQ ID NO: 3039 - DNA, 39 bp, Artificial Sequence
  source: /note="Description of Artificial Sequence: Synthetic oligonucleotide"
agtcagtcactgctggatagcggtaatcagaagaacttc

SEQ ID NO: 3040 - DNA, 9 bp, Artificial Sequence
  source: /note="Description of Artificial Sequence: Synthetic oligonucleotide"
tgggcctct

SEQ ID NO: 3041 - DNA, 18 bp, Artificial Sequence
  source: /note="Description of Artificial Sequence: Synthetic oligonucleotide"
gactatagctacccctac

SEQ ID NO: 3042 - protein, 440 aa, Artificial Sequence
  source: /note="Description of Artificial Sequence: Synthetic polypeptide"
QVQLVESGGGVVQPGRSLRLDCKASGITFSNSGMHWVRQAPGKGLEWVAVIWYDGSKRYYADSVKGRFTISRDNSKNTLFLQMNSLRAEDTAVYYCATNDDYWGQGTLVTVSSASTKGPSVFPLAPCSRSTSESTAALGCLVKDYFPEPVTVSWNSGALTSGVHTFPAVLQSSGLYSLSSVVTVPSSSLGTKTYTCNVDHKPSNTKVDKRVESKYGPPCPPCPAPEFLGGPSVFLFPPKPKDTLMISRTPEVTCVVVDVSQEDPEVQFNWYVDGVEVHNAKTKPREEQFNSTYRVVSVLTVLHQDWLNGKEYKCKVSNKGLPSSIEKTISKAKGQPREPQVYTLPPSQEEMTKNQVSLTCLVKGFYPSDIAVEWESNGQPENNYKTTPPVLDSDGSFFLYSRLTVDKSRWQEGNVFSCSVMHEALHNHYTQKSLSLSLGK

SEQ ID NO: 3043 - protein, 214 aa, Artificial Sequence
  source: /note="Description of Artificial Sequence: Synthetic polypeptide"
EIVLTQSPATLSLSPGERATLSCRASQSVSSYLAWYQQKPGQAPRLLIYDASNRATGIPARFSGSGSGTDFTLTISSLEPEDFAVYYCQQSSNWPRTFGQGTKVEIKRTVAAPSVFIFPPSDEQLKSGTASVVCLLNNFYPREAKVQWKVDNALQSGNSQESVTEQDSKDSTYSLSSTLTLSKADYEKHKVYACEVTHQGLSSPVTKSFNRGEC

SEQ ID NO: 3044 - protein, 447 aa, Artificial Sequence
  source: /note="Description of Artificial Sequence: Synthetic polypeptide"
QVQLVQSGVEVKKPGASVKVSCKASGYTFTNYYMYWVRQAPGQGLEWMGGINPSNGGTNFNEKFKNRVTLTTDSSTTTAYMELKSLQFDDTAVYYCARRDYRFDMGFDYWGQGTTVTVSSASTKGPSVFPLAPCSRSTSESTAALGCLVKDYFPEPVTVSWNSGALTSGVHTFPAVLQSSGLYSLSSVVTVPSSSLGTKTYTCNVDHKPSNTKVDKRVESKYGPPCPPCPAPEFLGGPSVFLFPPKPKDTLMISRTPEVTCVVVDVSQEDPEVQFNWYVDGVEVHNAKTKPREEQFNSTYRVVSVLTVLHQDWLNGKEYKCKVSNKGLPSSIEKTISKAKGQPREPQVYTLPPSQEEMTKNQVSLTCLVKGFYPSDIAVEWESNGQPENNYKTTPPVLDSDGSFFLYSRLTVDKSRWQEGNVFSCSVMHEALHNHYTQKSLSLSLGK

SEQ ID NO: 3045 - protein, 218 aa, Artificial Sequence
  source: /note="Description of Artificial Sequence: Synthetic polypeptide"
EIVLTQSPATLSLSPGERATLSCRASKGVSTSGYSYLHWYQQKPGQAPRLLIYLASYLESGVPARFSGSGSGTDFTLTISSLEPEDFAVYYCQHSRDLPLTFGGGTKVEIKRTVAAPSVFIFPPSDEQLKSGTASVVCLLNNFYPREAKVQWKVDNALQSGNSQESVTEQDSKDSTYSLSSTLTLSKADYEKHKVYACEVTHQGLSSPVTKSFNRGEC

SEQ ID NO: 3046 - protein, 447 aa, Artificial Sequence
  source: /note="Description of Artificial Sequence: Synthetic polypeptide"
QVQLVQSGSELKKPGASVKISCKASGYTFTNYGMNWVRQAPGQGLQWMGWINTDSGESTYAEEFKGRFVFSLDTSVNTAYLQITSLTAEDTGMYFCVRVGYDALDYWGQGTLVTVSSASTKGPSVFPLAPSSKSTSGGTAALGCLVKDYFPEPVTVSWNSGALTSGVHTFPAVLQSSGLYSLSSVVTVPSSSLGTQTYICNVNHKPSNTKVDKRVEPKSCDKTHTCPPCPAPELLGGPSVFLFPPKPKDTLMISRTPEVTCVVVDVSHEDPEVKFNWYVDGVEVHNAKTKPREEQYNSTYRVVSVLTVLHQDWLNGKEYKCKVSNKALPAPIEKTISKAKGQPREPQVYTLPPSREEMTKNQVSLTCLVKGFYPSDIAVEWESNGQPENNYKTTPPVLDSDGSFFLYSKLTVDKSRWQQGNVFSCSVMHEALHNHYTQKSLSLSPGK

SEQ ID NO: 3047 - protein, 213 aa, Artificial Sequence
  source: /note="Description of Artificial Sequence: Synthetic polypeptide"
EIVLTQSPSSLSASVGDRVTITCSARSSVSYMHWFQQKPGKAPKLWIYRTSNLASGVPSRFSGSGSGTSYCLTINSLQPEDFATYYCQQRSSFPLTFGGGTKLEIKRTVAAPSVFIFPPSDEQLKSGTASVVCLLNNFYPREAKVQWKVDNALQSGNSQESVTEQDSKDSTYSLSSTLTLSKADYEKHKVYACEVTHQGLSSPVTKSFNRGEC

SEQ ID NO: 3048 - protein, 5 aa, Artificial Sequence
  source: /note="Description of Artificial Sequence: Synthetic peptide"
SYWMY

SEQ ID NO: 3049 - protein, 17 aa, Artificial Sequence
  source: /note="Description of Artificial Sequence: Synthetic peptide"
RIDPNSGSTKYNEKFKN

SEQ ID NO: 3050 - protein, 11 aa, Artificial Sequence
  source: /note="Description of Artificial Sequence: Synthetic peptide"
DYRKGLYAMDY

SEQ ID NO: 3051 - protein, 7 aa, Artificial Sequence
  source: /note="Description of Artificial Sequence: Synthetic peptide"
GYTFTSY

SEQ ID NO: 3052 - protein, 6 aa, Artificial Sequence
  source: /note="Description of Artificial Sequence: Synthetic peptide"
DPNSGS

SEQ ID NO: 3053 - protein, 120 aa, Artificial Sequence
  source: /note="Description of Artificial Sequence: Synthetic polypeptide"
EVQLVQSGAEVKKPGATVKISCKVSGYTFTSYWMYWVRQARGQRLEWIGRIDPNSGSTKYNEKFKNRFTISRDNSKNTLYLQMNSLRAEDTAVYYCARDYRKGLYAMDYWGQGTTVTVSS

SEQ ID NO: 3054 - DNA, 360 bp, Artificial Sequence
  source: /note="Description of Artificial Sequence: Synthetic polynucleotide"
gaagtgcagctggtgcagtcaggcgccgaagtgaagaaacccggcgctaccgtgaagattagctgtaaagtctcaggctacaccttcactagctactggatgtactgggtccgacaggctagagggcaaagactggagtggatcggtagaatcgaccctaatagcggctctactaagtataacgagaagtttaagaataggttcactattagtagggataactctaagaacaccctgtacctgcagatgaatagcctgagagccgaggacaccgccgtctactactgcgctagagactatagaaagggcctgtacgctatggactactggggtcaaggcactaccgtgaccgtgtcttca

SEQ ID NO: 3055 - protein, 446 aa, Artificial Sequence
  source: /note="Description of Artificial Sequence: Synthetic polypeptide"
EVQLVQSGAEVKKPGATVKISCKVSGYTFTSYWMYWVRQARGQRLEWIGRIDPNSGSTKYNEKFKNRFTISRDNSKNTLYLQMNSLRAEDTAVYYCARDYRKGLYAMDYWGQGTTVTVSSASTKGPSVFPLAPCSRSTSESTAALGCLVKDYFPEPVTVSWNSGALTSGVHTFPAVLQSSGLYSLSSVVTVPSSSLGTKTYTCNVDHKPSNTKVDKRVESKYGPPCPPCPAPEFLGGPSVFLFPPKPKDTLMISRTPEVTCVVVDVSQEDPEVQFNWYVDGVEVHNAKTKPREEQFNSTYRVVSVLTVLHQDWLNGKEYKCKVSNKGLPSSIEKTISKAKGQPREPQVYTLPPSQEEMTKNQVSLTCLVKGFYPSDIAVEWESNGQPENNYKTTPPVLDSDGSFFLYSRLTVDKSRWQEGNVFSCSVMHEALHNHYTQKSLSLSLG

SEQ ID NO: 3056 - protein, 11 aa, Artificial Sequence
  source: /note="Description of Artificial Sequence: Synthetic peptide"
KASQDVGTAVA

SEQ ID NO: 3057 - protein, 7 aa, Artificial Sequence
  source: /note="Description of Artificial Sequence: Synthetic peptide"
WASTRHT

SEQ ID NO: 3058 - protein, 9 aa, Artificial Sequence
  source: /note="Description of Artificial Sequence: Synthetic peptide"
QQYNSYPLT

SEQ ID NO: 3059 - protein, 7 aa, Artificial Sequence
  source: /note="Description of Artificial Sequence: Synthetic peptide"
SQDVGTA

SEQ ID NO: 3060 - protein, 3 aa, Artificial Sequence
  source: /note="Description of Artificial Sequence: Synthetic peptide"
WAS

SEQ ID NO: 3061 - protein, 6 aa, Artificial Sequence
  source: /note="Description of Artificial Sequence: Synthetic peptide"
YNSYPL

SEQ ID NO: 3062 - DNA, 1338 bp, Artificial Sequence
  source: /note="Description of Artificial Sequence: Synthetic polynucleotide"
gaagtgcagctggtgcagtcaggcgccgaagtgaagaaacccggcgctaccgtgaagattagctgtaaagtctcaggctacaccttcactagctactggatgtactgggtccgacaggctagagggcaaagactggagtggatcggtagaatcgaccctaatagcggctctactaagtataacgagaagtttaagaataggttcactattagtagggataactctaagaacaccctgtacctgcagatgaatagcctgagagccgaggacaccgccgtctactactgcgctagagactatagaaagggcctgtacgctatggactactggggtcaaggcactaccgtgaccgtgtcttcagctagcactaagggcccgtccgtgttccccctggcaccttgtagccggagcactagcgaatccaccgctgccctcggctgcctggtcaaggattacttcccggagcccgtgaccgtgtcctggaacagcggagccctgacctccggagtgcacaccttccccgctgtgctgcagagctccgggctgtactcgctgtcgtcggtggtcacggtgccttcatctagcctgggtaccaagacctacacttgcaacgtggaccacaagccttccaacactaaggtggacaagcgcgtcgaatcgaagtacggcccaccgtgcccgccttgtcccgcgccggagttcctcggcggtccctcggtctttctgttcccaccgaagcccaaggacactttgatgatttcccgcacccctgaagtgacatgcgtggtcgtggacgtgtcacaggaagatccggaggtgcagttcaattggtacgtggatggcgtcgaggtgcacaacgccaaaaccaagccgagggaggagcagttcaactccacttaccgcgtcgtgtccgtgctgacggtgctgcatcaggactggctgaacgggaaggagtacaagtgcaaagtgtccaacaagggacttcctagctcaatcgaaaagaccatctcgaaagccaagggacagccccgggaaccccaagtgtataccctgccaccgagccaggaagaaatgactaagaaccaagtctcattgacttgccttgtgaagggcttctacccatcggatatcgccgtggaatgggagtccaacggccagccggaaaacaactacaagaccacccctccggtgctggactcagacggatccttcttcctctactcgcggctgaccgtggataagagcagatggcaggagggaaatgtgttcagctgttctgtgatgcatgaagccctgcacaaccactacactcagaagtccctgtccctctccctggga

SEQ ID NO: 3063 - protein, 107 aa, Artificial Sequence
  source: /note="Description of Artificial Sequence: Synthetic polypeptide"
AIQLTQSPSSLSASVGDRVTITCKASQDVGTAVAWYLQKPGQSPQLLIYWASTRHTGVPSRFSGSGSGTDFTFTISSLEAEDAATYYCQQYNSYPLTFGQGTKVEIK

SEQ ID NO: 3064 - DNA, 321 bp, Artificial Sequence
  source: /note="Description of Artificial Sequence: Synthetic polynucleotide"
gctattcagctgactcagtcacctagtagcctgagcgctagtgtgggcgatagagtgactatcacctgtaaagcctctcaggacgtgggcaccgccgtggcctggtatctgcagaagcctggtcaatcacctcagctgctgatctactgggcctctactagacacaccggcgtgccctctaggtttagcggtagcggtagtggcaccgacttcaccttcactatctcttcactggaagccgaggacgccgctacctactactgtcagcagtataatagctaccccctgaccttcggtcaaggcactaaggtcgagattaag

SEQ ID NO: 3065 - protein, 214 aa, Artificial Sequence
  source: /note="Description of Artificial Sequence: Synthetic polypeptide"
AIQLTQSPSSLSASVGDRVTITCKASQDVGTAVAWYLQKPGQSPQLLIYWASTRHTGVPSRFSGSGSGTDFTFTISSLEAEDAATYYCQQYNSYPLTFGQGTKVEIKRTVAAPSVFIFPPSDEQLKSGTASVVCLLNNFYPREAKVQWKVDNALQSGNSQESVTEQDSKDSTYSLSSTLTLSKADYEKHKVYACEVTHQGLSSPVTKSFNRGEC

SEQ ID NO: 3066 - DNA, 642 bp, Artificial Sequence
  source: /note="Description of Artificial Sequence: Synthetic polynucleotide"
gctattcagctgactcagtcacctagtagcctgagcgctagtgtgggcgatagagtgactatcacctgtaaagcctctcaggacgtgggcaccgccgtggcctggtatctgcagaagcctggtcaatcacctcagctgctgatctactgggcctctactagacacaccggcgtgccctctaggtttagcggtagcggtagtggcaccgacttcaccttcactatctcttcactggaagccgaggacgccgctacctactactgtcagcagtataatagctaccccctgaccttcggtcaaggcactaaggtcgagattaagcgtacggtggccgctcccagcgtgttcatcttcccccccagcgacgagcagctgaagagcggcaccgccagcgtggtgtgcctgctgaacaacttctacccccgggaggccaaggtgcagtggaaggtggacaacgccctgcagagcggcaacagccaggagagcgtcaccgagcaggacagcaaggactccacctacagcctgagcagcaccctgaccctgagcaaggccgactacgagaagcataaggtgtacgcctgcgaggtgacccaccagggcctgtccagccccgtgaccaagagcttcaacaggggcgagtgc

SEQ ID NO: 3067 - protein, 120 aa, Artificial Sequence
  source: /note="Description of Artificial Sequence: Synthetic polypeptide"
EVQLVQSGAEVKKPGATVKISCKVSGYTFTSYWMYWVRQATGQGLEWMGRIDPNSGSTKYNEKFKNRVTITADKSTSTAYMELSSLRSEDTAVYYCARDYRKGLYAMDYWGQGTTVTVSS

SEQ ID NO: 3068 - DNA, 360 bp, Artificial Sequence
  source: /note="Description of Artificial Sequence: Synthetic polynucleotide"
gaagtgcagctggtgcagtcaggcgccgaagtgaagaaacccggcgctaccgtgaagattagctgtaaagtctcaggctacaccttcactagctactggatgtactgggtccgacaggctaccggtcaaggcctggagtggatgggtagaatcgaccctaatagcggctctactaagtataacgagaagtttaagaatagagtgactatcaccgccgataagtctactagcaccgcctatatggaactgtctagcctgagatcagaggacaccgccgtctactactgcgctagagactatagaaagggcctgtacgctatggactactggggtcaaggcactaccgtgaccgtgtcttca

SEQ ID NO: 3069 - protein, 446 aa, Artificial Sequence
  source: /note="Description of Artificial Sequence: Synthetic polypeptide"
EVQLVQSGAEVKKPGATVKISCKVSGYTFTSYWMYWVRQATGQGLEWMGRIDPNSGSTKYNEKFKNRVTITADKSTSTAYMELSSLRSEDTAVYYCARDYRKGLYAMDYWGQGTTVTVSSASTKGPSVFPLAPCSRSTSESTAALGCLVKDYFPEPVTVSWNSGALTSGVHTFPAVLQSSGLYSLSSVVTVPSSSLGTKTYTCNVDHKPSNTKVDKRVESKYGPPCPPCPAPEFLGGPSVFLFPPKPKDTLMISRTPEVTCVVVDVSQEDPEVQFNWYVDGVEVHNAKTKPREEQFNSTYRVVSVLTVLHQDWLNGKEYKCKVSNKGLPSSIEKTISKAKGQPREPQVYTLPPSQEEMTKNQVSLTCLVKGFYPSDIAVEWESNGQPENNYKTTPPVLDSDGSFFLYSRLTVDKSRWQEGNVFSCSVMHEALHNHYTQKSLSLSLG

SEQ ID NO: 3070 - DNA, 1338 bp, Artificial Sequence
  source: /note="Description of Artificial Sequence: Synthetic polynucleotide"
gaagtgcagctggtgcagtcaggcgccgaagtgaagaaacccggcgctaccgtgaagattagctgtaaagtctcaggctacaccttcactagctactggatgtactgggtccgacaggctaccggtcaaggcctggagtggatgggtagaatcgaccctaatagcggctctactaagtataacgagaagtttaagaatagagtgactatcaccgccgataagtctactagcaccgcctatatggaactgtctagcctgagatcagaggacaccgccgtctactactgcgctagagactatagaaagggcctgtacgctatggactactggggtcaaggcactaccgtgaccgtgtcttcagctagcactaagggcccgtccgtgttccccctggcaccttgtagccggagcactagcgaatccaccgctgccctcggctgcctggtcaaggattacttcccggagcccgtgaccgtgtcctggaacagcggagccctgacctccggagtgcacaccttccccgctgtgctgcagagctccgggctgtactcgctgtcgtcggtggtcacggtgccttcatctagcctgggtaccaagacctacacttgcaacgtggaccacaagccttccaacactaaggtggacaagcgcgtcgaatcgaagtacggcccaccgtgcccgccttgtcccgcgccggagttcctcggcggtccctcggtctttctgttcccaccgaagcccaaggacactttgatgatttcccgcacccctgaagtgacatgcgtggtcgtggacgtgtcacaggaagatccggaggtgcagttcaattggtacgtggatggcgtcgaggtgcacaacgccaaaaccaagccgagggaggagcagttcaactccacttaccgcgtcgtgtccgtgctgacggtgctgcatcaggactggctgaacgggaaggagtacaagtgcaaagtgtccaacaagggacttcctagctcaatcgaaaagaccatctcgaaagccaagggacagccccgggaaccccaagtgtataccctgccaccgagccaggaagaaatgactaagaaccaagtctcattgacttgccttgtgaagggcttctacccatcggatatcgccgtggaatgggagtccaacggccagccggaaaacaactacaagaccacccctccggtgctggactcagacggatccttcttcctctactcgcggctgaccgtggataagagcagatggcaggagggaaatgtgttcagctgttctgtgatgcatgaagccctgcacaaccactacactcagaagtccctgtccctctccctggga

SEQ ID NO: 3071 - protein, 107 aa, Artificial Sequence
  source: /note="Description of Artificial Sequence: Synthetic polypeptide"
DVVMTQSPLSLPVTLGQPASISCKASQDVGTAVAWYQQKPGQAPRLLIYWASTRHTGVPSRFSGSGSGTEFTLTISSLQPDDFATYYCQQYNSYPLTFGQGTKVEIK

SEQ ID NO: 3072 - DNA, 321 bp, Artificial Sequence
  source: /note="Description of Artificial Sequence: Synthetic polynucleotide"
gacgtcgtgatgactcagtcacccctgagcctgcccgtgaccctggggcagcccgcctctattagctgtaaagcctctcaggacgtgggcaccgccgtggcctggtatcagcagaagccagggcaagcccctagactgctgatctactgggcctctactagacacaccggcgtgccctctaggtttagcggtagcggtagtggcaccgagttcaccctgactatctcttcactgcagcccgacgacttcgctacctactactgtcagcagtataatagctaccccctgaccttcggtcaaggcactaaggtcgagattaag

SEQ ID NO: 3073 - protein, 214 aa, Artificial Sequence
  source: /note="Description of Artificial Sequence: Synthetic polypeptide"
DVVMTQSPLSLPVTLGQPASISCKASQDVGTAVAWYQQKPGQAPRLLIYWASTRHTGVPSRFSGSGSGTEFTLTISSLQPDDFATYYCQQYNSYPLTFGQGTKVEIKRTVAAPSVFIFPPSDEQLKSGTASVVCLLNNFYPREAKVQWKVDNALQSGNSQESVTEQDSKDSTYSLSSTLTLSKADYEKHKVYACEVTHQGLSSPVTKSFNRGEC

SEQ ID NO: 3074 - DNA, 642 bp, Artificial Sequence
  source: /note="Description of Artificial Sequence: Synthetic polynucleotide"
gacgtcgtgatgactcagtcacccctgagcctgcccgtgaccctggggcagcccgcctctattagctgtaaagcctctcaggacgtgggcaccgccgtggcctggtatcagcagaagccagggcaagcccctagactgctgatctactgggcctctactagacacaccggcgtgccctctaggtttagcggtagcggtagtggcaccgagttcaccctgactatctcttcactgcagcccgacgacttcgctacctactactgtcagcagtataatagctaccccctgaccttcggtcaaggcactaaggtcgagattaagcgtacggtggccgctcccagcgtgttcatcttcccccccagcgacgagcagctgaagagcggcaccgccagcgtggtgtgcctgctgaacaacttctacccccgggaggccaaggtgcagtggaaggtggacaacgccctgcagagcggcaacagccaggagagcgtcaccgagcaggacagcaaggactccacctacagcctgagcagcaccctgaccctgagcaaggccgactacgagaagcataaggtgtacgcctgcgaggtgacccaccagggcctgtccagccccgtgaccaagagcttcaacaggggcgagtgc

SEQ ID NO: 3075 - DNA, 15 bp, Artificial Sequence
  source: /note="Description of Artificial Sequence: Synthetic oligonucleotide"
agctactggatgtac

SEQ ID NO: 3076 - DNA, 51 bp, Artificial Sequence
  source: /note="Description of Artificial Sequence: Synthetic oligonucleotide"
agaatcgaccctaatagcggctctactaagtataacgagaagtttaagaat

SEQ ID NO: 3077 - DNA, 33 bp, Artificial Sequence
  source: /note="Description of Artificial Sequence: Synthetic oligonucleotide"
gactatagaaagggcctgtacgctatggactac

SEQ ID NO: 3078 - DNA, 21 bp, Artificial Sequence
  source: /note="Description of Artificial Sequence: Synthetic oligonucleotide"
ggctacaccttcactagctac

SEQ ID NO: 3079 - DNA, 18 bp, Artificial Sequence
  source: /note="Description of Artificial Sequence: Synthetic oligonucleotide"
gaccctaatagcggctct

SEQ ID NO: 3080 - DNA, 33 bp, Artificial Sequence
  source: /note="Description of Artificial Sequence: Synthetic oligonucleotide"
aaagcctctcaggacgtgggcaccgccgtggcc

SEQ ID NO: 3081 - DNA, 21 bp, Artificial Sequence
  source: /note="Description of Artificial Sequence: Synthetic oligonucleotide"
tgggcctctactagacacacc

SEQ ID NO: 3082 - DNA, 27 bp, Artificial Sequence
  source: /note="Description of Artificial Sequence: Synthetic oligonucleotide"
cagcagtataatagctaccccctgacc

SEQ ID NO: 3083 - DNA, 21 bp, Artificial Sequence
  source: /note="Description of Artificial Sequence: Synthetic oligonucleotide"
tctcaggacgtgggcaccgcc

SEQ ID NO: 3084 - DNA, 9 bp, Artificial Sequence
  source: /note="Description of Artificial Sequence: Synthetic oligonucleotide"
tgggcctct

SEQ ID NO: 3085 - DNA, 18 bp, Artificial Sequence
  source: /note="Description of Artificial Sequence: Synthetic oligonucleotide"
tataatagctaccccctg

SEQ ID NO: 3086 - protein, 448 aa, Artificial Sequence
  source: /note="Description of Artificial Sequence: Synthetic polypeptide"
EVQLVESGGGLVQPGGSLRLSCAASGFTFSDSWIHWVRQAPGKGLEWVAWISPYGGSTYYADSVKGRFTISADTSKNTAYLQMNSLRAEDTAVYYCARRHWPGGFDYWGQGTLVTVSSASTKGPSVFPLAPSSKSTSGGTAALGCLVKDYFPEPVTVSWNSGALTSGVHTFPAVLQSSGLYSLSSVVTVPSSSLGTQTYICNVNHKPSNTKVDKKVEPKSCDKTHTCPPCPAPELLGGPSVFLFPPKPKDTLMISRTPEVTCVVVDVSHEDPEVKFNWYVDGVEVHNAKTKPREEQYASTYRVVSVLTVLHQDWLNGKEYKCKVSNKALPAPIEKTISKAKGQPREPQVYTLPPSREEMTKNQVSLTCLVKGFYPSDIAVEWESNGQPENNYKTTPPVLDSDGSFFLYSKLTVDKSRWQQGNVFSCSVMHEALHNHYTQKSLSLSPGK

SEQ ID NO: 3087 - protein, 214 aa, Artificial Sequence
  source: /note="Description of Artificial Sequence: Synthetic polypeptide"
DIQMTQSPSSLSASVGDRVTITCRASQDVSTAVAWYQQKPGKAPKLLIYSASFLYSGVPSRFSGSGSGTDFTLTISSLQPEDFATYYCQQYLYHPATFGQGTKVEIKRTVAAPSVFIFPPSDEQLKSGTASVVCLLNNFYPREAKVQWKVDNALQSGNSQESVTEQDSKDSTYSLSSTLTLSKADYEKHKVYACEVTHQGLSSPVTKSFNRGEC

SEQ ID NO: 3088 - protein, 450 aa, Artificial Sequence
  source: /note="Description of Artificial Sequence: Synthetic polypeptide"
EVQLLESGGGLVQPGGSLRLSCAASGFTFSSYIMMWVRQAPGKGLEWVSSIYPSGGITFYADTVKGRFTISRDNSKNTLYLQMNSLRAEDTAVYYCARIKLGTVTTVDYWGQGTLVTVSSASTKGPSVFPLAPSSKSTSGGTAALGCLVKDYFPEPVTVSWNSGALTSGVHTFPAVLQSSGLYSLSSVVTVPSSSLGTQTYICNVNHKPSNTKVDKKVEPKSCDKTHTCPPCPAPELLGGPSVFLFPPKPKDTLMISRTPEVTCVVVDVSHEDPEVKFNWYVDGVEVHNAKTKPREEQYNSTYRVVSVLTVLHQDWLNGKEYKCKVSNKALPAPIEKTISKAKGQPREPQVYTLPPSRDELTKNQVSLTCLVKGFYPSDIAVEWESNGQPENNYKTTPPVLDSDGSFFLYSKLTVDKSRWQQGNVFSCSVMHEALHNHYTQKSLSLSPGK

SEQ ID NO: 3089 - protein, 216 aa, Artificial Sequence
  source: /note="Description of Artificial Sequence: Synthetic polypeptide"
QSALTQPASVSGSPGQSITISCTGTSSDVGGYNYVSWYQQHPGKAPKLMIYDVSNRPSGVSNRFSGSKSGNTASLTISGLQAEDEADYYCSSYTSSSTRVFGTGTKVTVLGQPKANPTVTLFPPSSEELQANKATLVCLISDFYPGAVTVAWKADGSPVKAGVETTKPSKQSNNKYAASSYLSLTPEQWKSHRSYSCQVTHEGSTVEKTVAPTECS

SEQ ID NO: 3090 - protein, 451 aa, Artificial Sequence
  source: /note="Description of Artificial Sequence: Synthetic polypeptide"
EVQLVESGGGLVQPGGSLRLSCAASGFTFSRYWMSWVRQAPGKGLEWVANIKQDGSEKYYVDSVKGRFTISRDNAKNSLYLQMNSLRAEDTAVYYCAREGGWFGELAFDYWGQGTLVTVSSASTKGPSVFPLAPSSKSTSGGTAALGCLVKDYFPEPVTVSWNSGALTSGVHTFPAVLQSSGLYSLSSVVTVPSSSLGTQTYICNVNHKPSNTKVDKRVEPKSCDKTHTCPPCPAPEFEGGPSVFLFPPKPKDTLMISRTPEVTCVVVDVSHEDPEVKFNWYVDGVEVHNAKTKPREEQYNSTYRVVSVLTVLHQDWLNGKEYKCKVSNKALPASIEKTISKAKGQPREPQVYTLPPSREEMTKNQVSLTCLVKGFYPSDIAVEWESNGQPENNYKTTPPVLDSDGSFFLYSKLTVDKSRWQQGNVFSCSVMHEALHNHYTQKSLSLSPGK

SEQ ID NO: 3091 - protein, 215 aa, Artificial Sequence
  source: /note="Description of Artificial Sequence: Synthetic polypeptide"
EIVLTQSPGTLSLSPGERATLSCRASQRVSSSYLAWYQQKPGQAPRLLIYDASSRATGIPDRFSGSGSGTDFTLTISRLEPEDFAVYYCQQYGSLPWTFGQGTKVEIKRTVAAPSVFIFPPSDEQLKSGTASVVCLLNNFYPREAKVQWKVDNALQSGNSQESVTEQDSKDSTYSLSSTLTLSKADYEKHKVYACEVTHQGLSSPVTKSFNRGEC

SEQ ID NO: 3092 - protein, 123 aa, Artificial Sequence
  source: /note="Description of Artificial Sequence: Synthetic polypeptide"
QVQLVQSGAEVKKPGSSVKVSCKTSGDTFSTYAISWVRQAPGQGLEWMGGIIPIFGKAHYAQKFQGRVTITADESTSTAYMELSSLRSEDTAVYFCARKFHFVSGSPFGMDVWGQGTTVTVSS

SEQ ID NO: 3093 - protein, 106 aa, Artificial Sequence
  source: /note="Description of Artificial Sequence: Synthetic polypeptide"
EIVLTQSPATLSLSPGERATLSCRASQSVSSYLAWYQQKPGQAPRLLIYDASNRATGIPARFSGSGSGTDFTLTISSLEPEDFAVYYCQQRSNWPTFGQGTKVEIK

SEQ ID NO: 3094 - protein, 5 aa, Artificial Sequence
  source: /note="Description of Artificial Sequence: Synthetic peptide"
NYGMN

SEQ ID NO: 3095 - protein, 17 aa, Artificial Sequence
  source: /note="Description of Artificial Sequence: Synthetic peptide"
WINTDTGEPTYADDFKG

SEQ ID NO: 3096 - protein, 16 aa, Artificial Sequence
  source: /note="Description of Artificial Sequence: Synthetic peptide"
NPPYYYGTNNAEAMDY

SEQ ID NO: 3097 - protein, 7 aa, Artificial Sequence
  source: /note="Description of Artificial Sequence: Synthetic peptide"
GFTLTNY

SEQ ID NO: 3098 - protein, 6 aa, Artificial Sequence
  source: /note="Description of Artificial Sequence: Synthetic peptide"
NTDTGE

SEQ ID NO: 3099 - protein, 125 aa, Artificial Sequence
  source: /note="Description of Artificial Sequence: Synthetic polypeptide"
QVQLVQSGAEVKKPGASVKVSCKASGFTLTNYGMNWVRQARGQRLEWIGWINTDTGEPTYADDFKGRFVFSLDTSVSTAYLQISSLKAEDTAVYYCARNPPYYYGTNNAEAMDYWGQGTTVTVSS

SEQ ID NO: 3100 - DNA, 375 bp, Artificial Sequence
  source: /note="Description of Artificial Sequence: Synthetic polynucleotide"
caagtgcagctggtgcagtcgggagccgaagtgaagaagcctggagcctcggtgaaggtgtcgtgcaaggcatccggattcaccctcaccaattacgggatgaactgggtcagacaggcccggggtcaacggctggagtggatcggatggattaacaccgacaccggggagcctacctacgcggacgatttcaagggacggttcgtgttctccctcgacacctccgtgtccaccgcctacctccaaatctcctcactgaaagcggaggacaccgccgtgtactattgcgcgaggaacccgccctactactacggaaccaacaacgccgaagccatggactactggggccagggcaccactgtgactgtgtccagc

SEQ ID NO: 3101 - DNA, 375 bp, Artificial Sequence
  source: /note="Description of Artificial Sequence: Synthetic polynucleotide"
caggtgcagctggtgcagtctggcgccgaagtgaagaaacctggcgcctccgtgaaggtgtcctgcaaggcctctggcttcaccctgaccaactacggcatgaactgggtgcgacaggccaggggccagcggctggaatggatcggctggatcaacaccgacaccggcgagcctacctacgccgacgacttcaagggcagattcgtgttctccctggacacctccgtgtccaccgcctacctgcagatctccagcctgaaggccgaggataccgccgtgtactactgcgcccggaaccccccttactactacggcaccaacaacgccgaggccatggactattggggccagggcaccaccgtgaccgtgtcctct

SEQ ID NO: 3102 - protein, 451 aa, Artificial Sequence
  source: /note="Description of Artificial Sequence: Synthetic polypeptide"
QVQLVQSGAEVKKPGASVKVSCKASGFTLTNYGMNWVRQARGQRLEWIGWINTDTGEPTYADDFKGRFVFSLDTSVSTAYLQISSLKAEDTAVYYCARNPPYYYGTNNAEAMDYWGQGTTVTVSSASTKGPSVFPLAPCSRSTSESTAALGCLVKDYFPEPVTVSWNSGALTSGVHTFPAVLQSSGLYSLSSVVTVPSSSLGTKTYTCNVDHKPSNTKVDKRVESKYGPPCPPCPAPEFLGGPSVFLFPPKPKDTLMISRTPEVTCVVVDVSQEDPEVQFNWYVDGVEVHNAKTKPREEQFNSTYRVVSVLTVLHQDWLNGKEYKCKVSNKGLPSSIEKTISKAKGQPREPQVYTLPPSQEEMTKNQVSLTCLVKGFYPSDIAVEWESNGQPENNYKTTPPVLDSDGSFFLYSRLTVDKSRWQEGNVFSCSVMHEALHNHYTQKSLSLSLG

SEQ ID NO: 3103 - protein, 11 aa, Artificial Sequence
  source: /note="Description of Artificial Sequence: Synthetic peptide"
SSSQDISNYLN

SEQ ID NO: 3104 - protein, 7 aa, Artificial Sequence
  source: /note="Description of Artificial Sequence: Synthetic peptide"
YTSTLHL

SEQ ID NO: 3105 - protein, 9 aa, Artificial Sequence
  source: /note="Description of Artificial Sequence: Synthetic peptide"
QQYYNLPWT

SEQ ID NO: 3106 - protein, 7 aa, Artificial Sequence
  source: /note="Description of Artificial Sequence: Synthetic peptide"
SQDISNY

SEQ ID NO: 3107 - protein, 3 aa, Artificial Sequence
  source: /note="Description of Artificial Sequence: Synthetic peptide"
YTS

SEQ ID NO: 3108 - protein, 6 aa, Artificial Sequence
  source: /note="Description of Artificial Sequence: Synthetic peptide"
YYNLPW

SEQ ID NO: 3109 - DNA, 1353 bp, Artificial Sequence
  source: /note="Description of Artificial Sequence: Synthetic polynucleotide"
caagtgcagctggtgcagtcgggagccgaagtgaagaagcctggagcctcggtgaaggtgtcgtgcaaggcatccggattcaccctcaccaattacgggatgaactgggtcagacaggcccggggtcaacggctggagtggatcggatggattaacaccgacaccggggagcctacctacgcggacgatttcaagggacggttcgtgttctccctcgacacctccgtgtccaccgcctacctccaaatctcctcactgaaagcggaggacaccgccgtgtactattgcgcgaggaacccgccctactactacggaaccaacaacgccgaagccatggactactggggccagggcaccactgtgactgtgtccagcgcgtccactaagggcccgtccgtgttccccctggcaccttgtagccggagcactagcgaatccaccgctgccctcggctgcctggtcaaggattacttcccggagcccgtgaccgtgtcctggaacagcggagccctgacctccggagtgcacaccttccccgctgtgctgcagagctccgggctgtactcgctgtcgtcggtggtcacggtgccttcatctagcctgggtaccaagacctacacttgcaacgtggaccacaagccttccaacactaaggtggacaagcgcgtcgaatcgaagtacggcccaccgtgcccgccttgtcccgcgccggagttcctcggcggtccctcggtctttctgttcccaccgaagcccaaggacactttgatgatttcccgcacccctgaagtgacatgcgtggtcgtggacgtgtcacaggaagatccggaggtgcagttcaattggtacgtggatggcgtcgaggtgcacaacgccaaaaccaagccgagggaggagcagttcaactccacttaccgcgtcgtgtccgtgctgacggtgctgcatcaggactggctgaacgggaaggagtacaagtgcaaagtgtccaacaagggacttcctagctcaatcgaaaagaccatctcgaaagccaagggacagccccgggaaccccaagtgtataccctgccaccgagccaggaagaaatgactaagaaccaagtctcattgacttgccttgtgaagggcttctacccatcggatatcgccgtggaatgggagtccaacggccagccggaaaacaactacaagaccacccctccggtgctggactcagacggatccttcttcctctactcgcggctgaccgtggataagagcagatggcaggagggaaatgtgttcagctgttctgtgatgcatgaagccctgcacaaccactacactcagaagtccctgtccctctccctggga

SEQ ID NO: 3110 - DNA, 1353 bp, Artificial Sequence
  source: /note="Description of Artificial Sequence: Synthetic polynucleotide"
caggtgcagctggtgcagtctggcgccgaagtgaagaaacctggcgcctccgtgaaggtgtcctgcaaggcctctggcttcaccctgaccaactacggcatgaactgggtgcgacaggccaggggccagcggctggaatggatcggctggatcaacaccgacaccggcgagcctacctacgccgacgacttcaagggcagattcgtgttctccctggacacctccgtgtccaccgcctacctgcagatctccagcctgaaggccgaggataccgccgtgtactactgcgcccggaaccccccttactactacggcaccaacaacgccgaggccatggactattggggccagggcaccaccgtgaccgtgtcctctgcttctaccaaggggcccagcgtgttccccctggccccctgctccagaagcaccagcgagagcacagccgccctgggctgcctggtgaaggactacttccccgagcccgtgaccgtgtcctggaacagcggagccctgaccagcggcgtgcacaccttccccgccgtgctgcagagcagcggcctgtacagcctgagcagcgtggtgaccgtgcccagcagcagcctgggcaccaagacctacacctgtaacgtggaccacaagcccagcaacaccaaggtggacaagagggtggagagcaagtacggcccaccctgccccccctgcccagcccccgagttcctgggcggacccagcgtgttcctgttcccccccaagcccaaggacaccctgatgatcagcagaacccccgaggtgacctgtgtggtggtggacgtgtcccaggaggaccccgaggtccagttcaactggtacgtggacggcgtggaggtgcacaacgccaagaccaagcccagagaggagcagtttaacagcacctaccgggtggtgtccgtgctgaccgtgctgcaccaggactggctgaacggcaaagagtacaagtgtaaggtctccaacaagggcctgccaagcagcatcgaaaagaccatcagcaaggccaagggccagcctagagagccccaggtctacaccctgccacccagccaagaggagatgaccaagaaccaggtgtccctgacctgtctggtgaagggcttctacccaagcgacatcgccgtggagtgggagagcaacggccagcccgagaacaactacaagaccacccccccagtgctggacagcgacggcagcttcttcctgtacagcaggctgaccgtggacaagtccagatggcaggagggcaacgtctttagctgctccgtgatgcacgaggccctgcacaaccactacacccagaagagcctgagcctgtccctgggc

SEQ ID NO: 3111 - protein, 107 aa, Artificial Sequence
  source: /note="Description of Artificial Sequence: Synthetic polypeptide"
DIQMTQSPSSLSASVGDRVTITCSSSQDISNYLNWYLQKPGQSPQLLIYYTSTLHLGVPSRFSGSGSGTEFTLTISSLQPDDFATYYCQQYYNLPWTFGQGTKVEIK

SEQ ID NO: 3112 - DNA, 321 bp, Artificial Sequence
  source: /note="Description of Artificial Sequence: Synthetic polynucleotide"
gatattcagatgactcagtcacctagtagcctgagcgctagtgtgggcgatagagtgactatcacctgtagctctagtcaggatatctctaactacctgaactggtatctgcagaagcccggtcaatcacctcagctgctgatctactacactagcaccctgcacctgggcgtgccctctaggtttagcggtagcggtagtggcaccgagttcaccctgactatctctagcctgcagcccgacgacttcgctacctactactgtcagcagtactataacctgccctggaccttcggtcaaggcactaaggtcgagattaag

SEQ ID NO: 3113 - DNA, 321 bp, Artificial Sequence
  source: /note="Description of Artificial Sequence: Synthetic polynucleotide"
gacatccagatgacccagtccccctccagcctgtctgcttccgtgggcgacagagtgaccatcacctgttcctccagccaggacatctccaactacctgaactggtatctgcagaagcccggccagtcccctcagctgctgatctactacacctccaccctgcacctgggcgtgccctccagattttccggctctggctctggcaccgagtttaccctgaccatcagctccctgcagcccgacgacttcgccacctactactgccagcagtactacaacctgccctggaccttcggccagggcaccaaggtggaaatcaag

SEQ ID NO: 3114 - protein, 214 aa, Artificial Sequence
  source: /note="Description of Artificial Sequence: Synthetic polypeptide"
DIQMTQSPSSLSASVGDRVTITCSSSQDISNYLNWYLQKPGQSPQLLIYYTSTLHLGVPSRFSGSGSGTEFTLTISSLQPDDFATYYCQQYYNLPWTFGQGTKVEIKRTVAAPSVFIFPPSDEQLKSGTASVVCLLNNFYPREAKVQWKVDNALQSGNSQESVTEQDSKDSTYSLSSTLTLSKADYEKHKVYACEVTHQGLSSPVTKSFNRGEC

SEQ ID NO: 3115 - DNA, 642 bp, Artificial Sequence
  source: /note="Description of Artificial Sequence: Synthetic polynucleotide"
gatattcagatgactcagtcacctagtagcctgagcgctagtgtgggcgatagagtgactatcacctgtagctctagtcaggatatctctaactacctgaactggtatctgcagaagcccggtcaatcacctcagctgctgatctactacactagcaccctgcacctgggcgtgccctctaggtttagcggtagcggtagtggcaccgagttcaccctgactatctctagcctgcagcccgacgacttcgctacctactactgtcagcagtactataacctgccctggaccttcggtcaaggcactaaggtcgagattaagcgtacggtggccgctcccagcgtgttcatcttcccccccagcgacgagcagctgaagagcggcaccgccagcgtggtgtgcctgctgaacaacttctacccccgggaggccaaggtgcagtggaaggtggacaacgccctgcagagcggcaacagccaggagagcgtcaccgagcaggacagcaaggactccacctacagcctgagcagcaccctgaccctgagcaaggccgactacgagaagcataaggtgtacgcctgcgaggtgacccaccagggcctgtccagccccgtgaccaagagcttcaacaggggcgagtgc

SEQ ID NO: 3116 - DNA, 642 bp, Artificial Sequence
  source: /note="Description of Artificial Sequence: Synthetic polynucleotide"
gacatccagatgacccagtccccctccagcctgtctgcttccgtgggcgacagagtgaccatcacctgttcctccagccaggacatctccaactacctgaactggtatctgcagaagcccggccagtcccctcagctgctgatctactacacctccaccctgcacctgggcgtgccctccagattttccggctctggctctggcaccgagtttaccctgaccatcagctccctgcagcccgacgacttcgccacctactactgccagcagtactacaacctgccctggaccttcggccagggcaccaaggtggaaatcaagcgtacggtggccgctcccagcgtgttcatcttccccccaagcgacgagcagctgaagagcggcaccgccagcgtggtgtgtctgctgaacaacttctaccccagggaggccaaggtgcagtggaaggtggacaacgccctgcagagcggcaacagccaggagagcgtcaccgagcaggacagcaaggactccacctacagcctgagcagcaccctgaccctgagcaaggccgactacgagaagcacaaggtgtacgcctgtgaggtgacccaccagggcctgtccagccccgtgaccaagagcttcaacaggggcgagtgc

SEQ ID NO: 3117 - protein, 125 aa, Artificial Sequence
  source: /note="Description of Artificial Sequence: Synthetic polypeptide"
QVQLVQSGAEVKKPGASVKVSCKASGFTLTNYGMNWVRQAPGQGLEWMGWINTDTGEPTYADDFKGRFVFSLDTSVSTAYLQISSLKAEDTAVYYCARNPPYYYGTNNAEAMDYWGQGTTVTVSS

SEQ ID NO: 3118 - DNA, 375 bp, Artificial Sequence
  source: /note="Description of Artificial Sequence: Synthetic polynucleotide"
caggtgcagctggtgcagtcaggcgccgaagtgaagaaacccggcgctagtgtgaaagtcagctgtaaagctagtggcttcaccctgactaactacgggatgaactgggtccgccaggccccaggtcaaggcctcgagtggatgggctggattaacaccgacaccggcgagcctacctacgccgacgactttaagggcagattcgtgtttagcctggacactagtgtgtctaccgcctacctgcagatctctagcctgaaggccgaggacaccgccgtctactactgcgctagaaaccccccctactactacggcactaacaacgccgaggctatggactactggggtcaaggcactaccgtgaccgtgtctagc

SEQ ID NO: 3119 - DNA, 375 bp, Artificial Sequence
  source: /note="Description of Artificial Sequence: Synthetic polynucleotide"
caggtgcagctggtgcagtctggcgccgaagtgaagaaacctggcgcctccgtgaaggtgtcctgcaaggcctctggcttcaccctgaccaactacggcatgaactgggtgcgacaggcccctggacagggcctggaatggatgggctggatcaacaccgacaccggcgagcctacctacgccgacgacttcaagggcagattcgtgttctccctggacacctccgtgtccaccgcctacctgcagatctccagcctgaaggccgaggataccgccgtgtactactgcgcccggaaccccccttactactacggcaccaacaacgccgaggccatggactattggggccagggcaccaccgtgaccgtgtcctct

SEQ ID NO: 3120 - protein, 451 aa, Artificial Sequence
  source: /note="Description of Artificial Sequence: Synthetic polypeptide"
QVQLVQSGAEVKKPGASVKVSCKASGFTLTNYGMNWVRQAPGQGLEWMGWINTDTGEPTYADDFKGRFVFSLDTSVSTAYLQISSLKAEDTAVYYCARNPPYYYGTNNAEAMDYWGQGTTVTVSSASTKGPSVFPLAPCSRSTSESTAALGCLVKDYFPEPVTVSWNSGALTSGVHTFPAVLQSSGLYSLSSVVTVPSSSLGTKTYTCNVDHKPSNTKVDKRVESKYGPPCPPCPAPEFLGGPSVFLFPPKPKDTLMISRTPEVTCVVVDVSQEDPEVQFNWYVDGVEVHNAKTKPREEQFNSTYRVVSVLTVLHQDWLNGKEYKCKVSNKGLPSSIEKTISKAKGQPREPQVYTLPPSQEEMTKNQVSLTCLVKGFYPSDIAVEWESNGQPENNYKTTPPVLDSDGSFFLYSRLTVDKSRWQEGNVFSCSVMHEALHNHYTQKSLSLSLG

SEQ ID NO: 3121 - DNA, 1353 bp, Artificial Sequence
  source: /note="Description of Artificial Sequence: Synthetic polynucleotide"
caggtgcagctggtgcagtcaggcgccgaagtgaagaaacccggcgctagtgtgaaagtcagctgtaaagctagtggcttcaccctgactaactacgggatgaactgggtccgccaggccccaggtcaaggcctcgagtggatgggctggattaacaccgacaccggcgagcctacctacgccgacgactttaagggcagattcgtgtttagcctggacactagtgtgtctaccgcctacctgcagatctctagcctgaaggccgaggacaccgccgtctactactgcgctagaaaccccccctactactacggcactaacaacgccgaggctatggactactggggtcaaggcactaccgtgaccgtgtctagcgctagcactaagggcccgtccgtgttccccctggcaccttgtagccggagcactagcgaatccaccgctgccctcggctgcctggtcaaggattacttcccggagcccgtgaccgtgtcctggaacagcggagccctgacctccggagtgcacaccttccccgctgtgctgcagagctccgggctgtactcgctgtcgtcggtggtcacggtgccttcatctagcctgggtaccaagacctacacttgcaacgtggaccacaagccttccaacactaaggtggacaagcgcgtcgaatcgaagtacggcccaccgtgcccgccttgtcccgcgccggagttcctcggcggtccctcggtctttctgttcccaccgaagcccaaggacactttgatgatttcccgcacccctgaagtgacatgcgtggtcgtggacgtgtcacaggaagatccggaggtgcagttcaattggtacgtggatggcgtcgaggtgcacaacgccaaaaccaagccgagggaggagcagttcaactccacttaccgcgtcgtgtccgtgctgacggtgctgcatcaggactggctgaacgggaaggagtacaagtgcaaagtgtccaacaagggacttcctagctcaatcgaaaagaccatctcgaaagccaagggacagccccgggaaccccaagtgtataccctgccaccgagccaggaagaaatgactaagaaccaagtctcattgacttgccttgtgaagggcttctacccatcggatatcgccgtggaatgggagtccaacggccagccggaaaacaactacaagaccacccctccggtgctggactcagacggatccttcttcctctactcgcggctgaccgtggataagagcagatggcaggagggaaatgtgttcagctgttctgtgatgcatgaagccctgcacaaccactacactcagaagtccctgtccctctccctggga

SEQ ID NO: 3122 - DNA, 1353 bp, Artificial Sequence
  source: /note="Description of Artificial Sequence: Synthetic polynucleotide"
caggtgcagctggtgcagtctggcgccgaagtgaagaaacctggcgcctccgtgaaggtgtcctgcaaggcctctggcttcaccctgaccaactacggcatgaactgggtgcgacaggcccctggacagggcctggaatggatgggctggatcaacaccgacaccggcgagcctacctacgccgacgacttcaagggcagattcgtgttctccctggacacctccgtgtccaccgcctacctgcagatctccagcctgaaggccgaggataccgccgtgtactactgcgcccggaaccccccttactactacggcaccaacaacgccgaggccatggactattggggccagggcaccaccgtgaccgtgtcctctgcttctaccaaggggcccagcgtgttccccctggccccctgctccagaagcaccagcgagagcacagccgccctgggctgcctggtgaaggactacttccccgagcccgtgaccgtgtcctggaacagcggagccctgaccagcggcgtgcacaccttccccgccgtgctgcagagcagcggcctgtacagcctgagcagcgtggtgaccgtgcccagcagcagcctgggcaccaagacctacacctgtaacgtggaccacaagcccagcaacaccaaggtggacaagagggtggagagcaagtacggcccaccctgccccccctgcccagcccccgagttcctgggcggacccagcgtgttcctgttcccccccaagcccaaggacaccctgatgatcagcagaacccccgaggtgacctgtgtggtggtggacgtgtcccaggaggaccccgaggtccagttcaactggtacgtggacggcgtggaggtgcacaacgccaagaccaagcccagagaggagcagtttaacagcacctaccgggtggtgtccgtgctgaccgtgctgcaccaggactggctgaacggcaaagagtacaagtgtaaggtctccaacaagggcctgccaagcagcatcgaaaagaccatcagcaaggccaagggccagcctagagagccccaggtctacaccctgccacccagccaagaggagatgaccaagaaccaggtgtccctgacctgtctggtgaagggcttctacccaagcgacatcgccgtggagtgggagagcaacggccagcccgagaacaactacaagaccacccccccagtgctggacagcgacggcagcttcttcctgtacagcaggctgaccgtggacaagtccagatggcaggagggcaacgtctttagctgctccgtgatgcacgaggccctgcacaaccactacacccagaagagcctgagcctgtccctgggc

SEQ ID NO: 3123 - protein, 107 aa, Artificial Sequence
  source: /note="Description of Artificial Sequence: Synthetic polypeptide"
DIQMTQSPSSLSASVGDRVTITCSSSQDISNYLNWYQQKPGKAPKLLIYYTSTLHLGIPPRFSGSGYGTDFTLTINNIESEDAAYYFCQQYYNLPWTFGQGTKVEIK

SEQ ID NO: 3124 - DNA, 321 bp, Artificial Sequence
  source: /note="Description of Artificial Sequence: Synthetic polynucleotide"
gatattcagatgactcagtcacctagtagcctgagcgctagtgtgggcgatagagtgactatcacctgtagctctagtcaggatatctctaactacctgaactggtatcagcagaagcccggtaaagcccctaagctgctgatctactacactagcaccctgcacctgggaatcccccctaggtttagcggtagcggctacggcaccgacttcaccctgactattaacaatatcgagtcagaggacgccgcctactacttctgtcagcagtactataacctgccctggaccttcggtcaaggcactaaggtcgagattaag

SEQ ID NO: 3125 - DNA, 321 bp, Artificial Sequence
  source: /note="Description of Artificial Sequence: Synthetic polynucleotide"
gacatccagatgacccagtccccctccagcctgtctgcttccgtgggcgacagagtgaccatcacctgttcctccagccaggacatctccaactacctgaactggtatcagcagaagcccggcaaggcccccaagctgctgatctactacacctccaccctgcacctgggcatcccccctagattctccggctctggctacggcaccgacttcaccctgaccatcaacaacatcgagtccgaggacgccgcctactacttctgccagcagtactacaacctgccctggaccttcggccagggcaccaaggtggaaatcaag

SEQ ID NO: 3126 - protein, 214 aa, Artificial Sequence
  source: /note="Description of Artificial Sequence: Synthetic polypeptide"
DIQMTQSPSSLSASVGDRVTITCSSSQDISNYLNWYQQKPGKAPKLLIYYTSTLHLGIPPRFSGSGYGTDFTLTINNIESEDAAYYFCQQYYNLPWTFGQGTKVEIKRTVAAPSVFIFPPSDEQLKSGTASVVCLLNNFYPREAKVQWKVDNALQSGNSQESVTEQDSKDSTYSLSSTLTLSKADYEKHKVYACEVTHQGLSSPVTKSFNRGEC

SEQ ID NO: 3127 - DNA, 642 bp, Artificial Sequence
  source: /note="Description of Artificial Sequence: Synthetic polynucleotide"
gatattcagatgactcagtcacctagtagcctgagcgctagtgtgggcgatagagtgactatcacctgtagctctagtcaggatatctctaactacctgaactggtatcagcagaagcccggtaaagcccctaagctgctgatctactacactagcaccctgcacctgggaatcccccctaggtttagcggtagcggctacggcaccgacttcaccctgactattaacaatatcgagtcagaggacgccgcctactacttctgtcagcagtactataacctgccctggaccttcggtcaaggcactaaggtcgagattaagcgtacggtggccgctcccagcgtgttcatcttcccccccagcgacgagcagctgaagagcggcaccgccagcgtggtgtgcctgctgaacaacttctacccccgggaggccaaggtgcagtggaaggtggacaacgccctgcagagcggcaacagccaggagagcgtcaccgagcaggacagcaaggactccacctacagcctgagcagcaccctgaccctgagcaaggccgactacgagaagcataaggtgtacgcctgcgaggtgacccaccagggcctgtccagccccgtgaccaagagcttcaacaggggcgagtgc

SEQ ID NO: 3128 - DNA, 642 bp, Artificial Sequence
  source: /note="Description of Artificial Sequence: Synthetic polynucleotide"
gacatccagatgacccagtccccctccagcctgtctgcttccgtgggcgacagagtgaccatcacctgttcctccagccaggacatctccaactacctgaactggtatcagcagaagcccggcaaggcccccaagctgctgatctactacacctccaccctgcacctgggcatcccccctagattctccggctctggctacggcaccgacttcaccctgaccatcaacaacatcgagtccgaggacgccgcctactacttctgccagcagtactacaacctgccctggaccttcggccagggcaccaaggtggaaatcaagcgtacggtggccgctcccagcgtgttcatcttccccccaagcgacgagcagctgaagagcggcaccgccagcgtggtgtgtctgctgaacaacttctaccccagggaggccaaggtgcagtggaaggtggacaacgccctgcagagcggcaacagccaggagagcgtcaccgagcaggacagcaaggactccacctacagcctgagcagcaccctgaccctgagcaaggccgactacgagaagcacaaggtgtacgcctgtgaggtgacccaccagggcctgtccagccccgtgaccaagagcttcaacaggggcgagtgc

SEQ ID NO: 3129 - DNA, 15 bp, Artificial Sequence
  source: /note="Description of Artificial Sequence: Synthetic oligonucleotide"
aattacgggatgaac

SEQ ID NO: 3130 - DNA, 15 bp, Artificial Sequence
  source: /note="Description of Artificial Sequence: Synthetic oligonucleotide"
aactacggcatgaac

SEQ ID NO: 3131 - DNA, 51 bp, Artificial Sequence
  source: /note="Description of Artificial Sequence: Synthetic oligonucleotide"
tggattaacaccgacaccggggagcctacctacgcggacgatttcaaggga

SEQ ID NO: 3132 - DNA, 51 bp, Artificial Sequence
  source: /note="Description of Artificial Sequence: Synthetic oligonucleotide"
tggatcaacaccgacaccggcgagcctacctacgccgacgacttcaagggc

SEQ ID NO: 3133 - DNA, 48 bp, Artificial Sequence
  source: /note="Description of Artificial Sequence: Synthetic oligonucleotide"
aacccgccctactactacggaaccaacaacgccgaagccatggactac

SEQ ID NO: 3134 - DNA, 48 bp, Artificial Sequence
  source: /note="Description of Artificial Sequence: Synthetic oligonucleotide"
aaccccccttactactacggcaccaacaacgccgaggccatggactat

SEQ ID NO: 3135 - DNA, 21 bp, Artificial Sequence
  source: /note="Description of Artificial Sequence: Synthetic oligonucleotide"
ggattcaccctcaccaattac

SEQ ID NO: 3136 - DNA, 21 bp, Artificial Sequence
  source: /note="Description of Artificial Sequence: Synthetic oligonucleotide"
ggcttcaccctgaccaactac

SEQ ID NO: 3137 - DNA, 18 bp, Artificial Sequence
  source: /note="Description of Artificial Sequence: Synthetic oligonucleotide"
aacaccgacaccggggag

SEQ ID NO: 3138 - DNA, 18 bp, Artificial Sequence
  source: /note="Description of Artificial Sequence: Synthetic oligonucleotide"
aacaccgacaccggcgag

SEQ ID NO: 3139 - DNA, 33 bp, Artificial Sequence
  source: /note="Description of Artificial Sequence: Synthetic oligonucleotide"
agctctagtcaggatatctctaactacctgaac

SEQ ID NO: 3140 - DNA, 33 bp, Artificial Sequence
  source: /note="Description of Artificial Sequence: Synthetic oligonucleotide"
tcctccagccaggacatctccaactacctgaac

SEQ ID NO: 3141 - DNA, 21 bp, Artificial Sequence
  source: /note="Description of Artificial Sequence: Synthetic oligonucleotide"
tacactagcaccctgcacctg

SEQ ID NO: 3142 - DNA, 21 bp, Artificial Sequence
  source: /note="Description of Artificial Sequence: Synthetic oligonucleotide"
tacacctccaccctgcacctg

SEQ ID NO: 3143 - DNA, 27 bp, Artificial Sequence
  source: /note="Description of Artificial Sequence: Synthetic oligonucleotide"
cagcagtactataacctgccctggacc

SEQ ID NO: 3144 - DNA, 27 bp, Artificial Sequence
  source: /note="Description of Artificial Sequence: Synthetic oligonucleotide"
cagcagtactacaacctgccctggacc

SEQ ID NO: 3145 - DNA, 21 bp, Artificial Sequence
  source: /note="Description of Artificial Sequence: Synthetic oligonucleotide"
agtcaggatatctctaactac

SEQ ID NO: 3146 - DNA, 21 bp, Artificial Sequence
  source: /note="Description of Artificial Sequence: Synthetic oligonucleotide"
agccaggacatctccaactac

SEQ ID NO: 3147 - DNA, 9 bp, Artificial Sequence
  source: /note="Description of Artificial Sequence: Synthetic oligonucleotide"
tacactagc

SEQ ID NO: 3148 - DNA, 9 bp, Artificial Sequence
  source: /note="Description of Artificial Sequence: Synthetic oligonucleotide"
tacacctcc

SEQ ID NO: 3149 - DNA, 18 bp, Artificial Sequence
  source: /note="Description of Artificial Sequence: Synthetic oligonucleotide"
tactataacctgccctgg

SEQ ID NO: 3150 - DNA, 15 bp, Artificial Sequence
  source: /note="Description of Artificial Sequence: Synthetic oligonucleotide"
aactacgggatgaac

SEQ ID NO: 3151 - DNA, 51 bp, Artificial Sequence
  source: /note="Description of Artificial Sequence: Synthetic oligonucleotide"
tggattaacaccgacaccggcgagcctacctacgccgacgactttaagggc

SEQ ID NO: 3152 - DNA, 48 bp, Artificial Sequence
  source: /note="Description of Artificial Sequence: Synthetic oligonucleotide"
aaccccccctactactacggcactaacaacgccgaggctatggactac

SEQ ID NO: 3153 - DNA, 21 bp, Artificial Sequence
  source: /note="Description of Artificial Sequence: Synthetic oligonucleotide"
ggcttcaccctgactaactac

SEQ ID NO: 3154 - protein, 447 aa, Artificial Sequence
  source: /note="Description of Artificial Sequence: Synthetic polypeptide"
QVQLQQWGAGLLKPSETLSLTCAVYGGSFSDYYWNWIRQPPGKGLEWIGEINHRGSTNSNPSLKSRVTLSLDTSKNQFSLKLRSVTAADTAVYYCAFGYSDYEYNWFDPWGQGTLVTVSSASTKGPSVFPLAPCSRSTSESTAALGCLVKDYFPEPVTVSWNSGALTSGVHTFPAVLQSSGLYSLSSVVTVPSSSLGTKTYTCNVDHKPSNTKVDKRVESKYGPPCPPCPAPEFLGGPSVFLFPPKPKDTLMISRTPEVTCVVVDVSQEDPEVQFNWYVDGVEVHNAKTKPREEQFNSTYRVVSVLTVLHQDWLNGKEYKCKVSNKGLPSSIEKTISKAKGQPREPQVYTLPPSQEEMTKNQVSLTCLVKGFYPSDIAVEWESNGQPENNYKTTPPVLDSDGSFFLYSRLTVDKSRWQEGNVFSCSVMHEALHNHYTQKSLSLSLGK

SEQ ID NO: 3155 - protein, 214 aa, Artificial Sequence
  source: /note="Description of Artificial Sequence: Synthetic polypeptide"
EIVLTQSPATLSLSPGERATLSCRASQSISSYLAWYQQKPGQAPRLLIYDASNRATGIPARFSGSGSGTDFTLTISSLEPEDFAVYYCQQRSNWPLTFGQGTNLEIKRTVAAPSVFIFPPSDEQLKSGTASVVCLLNNFYPREAKVQWKVDNALQSGNSQESVTEQDSKDSTYSLSSTLTLSKADYEKHKVYACEVTHQGLSSPVTKSFNRGEC

SEQ ID NO: 3156 - protein, 446 aa, Artificial Sequence
  source: /note="Description of Artificial Sequence: Synthetic polypeptide"
QVQLKESGPGLVAPSQSLSITCTVSGFSLTAYGVNWVRQPPGKGLEWLGMIWDDGSTDYNSALKSRLSISKDNSKSQVFLKMNSLQTDDTARYYCAREGDVAFDYWGQGTTLTVSSASTKGPSVFPLAPSSKSTSGGTAALGCLVKDYFPEPVTVSWNSGALTSGVHTFPAVLQSSGLYSLSSVVTVPSSSLGTQTYICNVNHKPSNTKVDKKVEPKSCDKTHTCPPCPAPELLGGPSVFLFPPKPKDTLMISRTPEVTCVVVDVSHEDPEVKFNWYVDGVEVHNAKTKPREEQYNSTYRVVSVLTVLHQDWLNGKEYKCKVSNKALPAPIEKTISKAKGQPREPQVYTLPPSRDELTKNQVSLTCLVKGFYPSDIAVEWESNGQPENNYKTTPPVLDSDGSFFLYSKLTVDKSRWQQGNVFSCSVMHEALHNHYTQKSLSLSPGK

SEQ ID NO: 3157 - protein, 220 aa, Artificial Sequence
  source: /note="Description of Artificial Sequence: Synthetic polypeptide"
DIVMTQSPSSLAVSVGQKVTMSCKSSQSLLNGSNQKNYLAWYQQKPGQSPKLLVYFASTRDSGVPDRFIGSGSGTDFTLTISSVQAEDLADYFCLQHFGTPPTFGGGTKLEIKRTVAAPSVFIFPPSDEQLKSGTASVVCLLNNFYPREAKVQWKVDNALQSGNSQESVTEQDSKDSTYSLSSTLTLSKADYEKHKVYACEVTHQGLSSPVTKSFNRGEC

SEQ ID NO: 3158 - protein, 10 aa, Artificial Sequence
  source: /note="Description of Artificial Sequence: Synthetic peptide"
GFTLTNYGMN

SEQ ID NO: 3159 - protein, 5 aa, Artificial Sequence
  source: /note="Description of Artificial Sequence: Synthetic peptide"
SYNMH

SEQ ID NO: 3160 - protein, 17 aa, Artificial Sequence
  source: /note="Description of Artificial Sequence: Synthetic peptide"
DIYPGNGDTSYNQKFKG

SEQ ID NO: 3161 - protein, 9 aa, Artificial Sequence
  source: /note="Description of Artificial Sequence: Synthetic peptide"
VGGAFPMDY

SEQ ID NO: 3162 - protein, 7 aa, Artificial Sequence
  source: /note="Description of Artificial Sequence: Synthetic peptide"
GYTFTSY

SEQ ID NO: 3163 - protein, 6 aa, Artificial Sequence
  source: /note="Description of Artificial Sequence: Synthetic peptide"
YPGNGD

SEQ ID NO: 3164 - protein, 118 aa, Artificial Sequence
  source: /note="Description of Artificial Sequence: Synthetic polypeptide"
QVQLVQSGAEVKKPGSSVKVSCKASGYTFTSYNMHWVRQAPGQGLEWMGDIYPGNGDTSYNQKFKGRVTITADKSTSTVYMELSSLRSEDTAVYYCARVGGAFPMDYWGQGTTVTVSS

SEQ ID NO: 3165 - DNA, 354 bp, Artificial Sequence
  source: /note="Description of Artificial Sequence: Synthetic polynucleotide"
caggtgcagctggtgcagtcaggcgccgaagtgaagaaacccggctctagcgtgaaagtttcttgtaaagctagtggctacaccttcactagctataatatgcactgggttcgccaggccccagggcaaggcctcgagtggatgggcgatatctaccccgggaacggcgacactagttataatcagaagtttaagggtagagtcactatcaccgccgataagtctactagcaccgtctatatggaactgagttccctgaggtctgaggacaccgccgtctactactgcgctagagtgggcggagccttccctatggactactggggtcaaggcactaccgtgaccgtgtctagc

SEQ ID NO: 3166 - protein, 444 aa, Artificial Sequence
  source: /note="Description of Artificial Sequence: Synthetic polypeptide"
QVQLVQSGAEVKKPGSSVKVSCKASGYTFTSYNMHWVRQAPGQGLEWMGDIYPGNGDTSYNQKFKGRVTITADKSTSTVYMELSSLRSEDTAVYYCARVGGAFPMDYWGQGTTVTVSSASTKGPSVFPLAPCSRSTSESTAALGCLVKDYFPEPVTVSWNSGALTSGVHTFPAVLQSSGLYSLSSVVTVPSSSLGTKTYTCNVDHKPSNTKVDKRVESKYGPPCPPCPAPEFLGGPSVFLFPPKPKDTLMISRTPEVTCVVVDVSQEDPEVQFNWYVDGVEVHNAKTKPREEQFNSTYRVVSVLTVLHQDWLNGKEYKCKVSNKGLPSSIEKTISKAKGQPREPQVYTLPPSQEEMTKNQVSLTCLVKGFYPSDIAVEWESNGQPENNYKTTPPVLDSDGSFFLYSRLTVDKSRWQEGNVFSCSVMHEALHNHYTQKSLSLSLG

SEQ ID NO: 3167 - DNA, 1332 bp, Artificial Sequence
  source: /note="Description of Artificial Sequence: Synthetic polynucleotide"
caggtgcagctggtgcagtcaggcgccgaagtgaagaaacccggctctagcgtgaaagtttcttgtaaagctagtggctacaccttcactagctataatatgcactgggttcgccaggccccagggcaaggcctcgagtggatgggcgatatctaccccgggaacggcgacactagttataatcagaagtttaagggtagagtcactatcaccgccgataagtctactagcaccgtctatatggaactgagttccctgaggtctgaggacaccgccgtctactactgcgctagagtgggcggagccttccctatggactactggggtcaaggcactaccgtgaccgtgtctagcgctagcactaagggcccgtccgtgttccccctggcaccttgtagccggagcactagcgaatccaccgctgccctcggctgcctggtcaaggattacttcccggagcccgtgaccgtgtcctggaacagcggagccctgacctccggagtgcacaccttccccgctgtgctgcagagctccgggctgtactcgctgtcgtcggtggtcacggtgccttcatctagcctgggtaccaagacctacacttgcaacgtggaccacaagccttccaacactaaggtggacaagcgcgtcgaatcgaagtacggcccaccgtgcccgccttgtcccgcgccggagttcctcggcggtccctcggtctttctgttcccaccgaagcccaaggacactttgatgatttcccgcacccctgaagtgacatgcgtggtcgtggacgtgtcacaggaagatccggaggtgcagttcaattggtacgtggatggcgtcgaggtgcacaacgccaaaaccaagccgagggaggagcagttcaactccacttaccgcgtcgtgtccgtgctgacggtgctgcatcaggactggctgaacgggaaggagtacaagtgcaaagtgtccaacaagggacttcctagctcaatcgaaaagaccatctcgaaagccaagggacagccccgggaaccccaagtgtataccctgccaccgagccaggaagaaatgactaagaaccaagtctcattgacttgccttgtgaagggcttctacccatcggatatcgccgtggaatgggagtccaacggccagccggaaaacaactacaagaccacccctccggtgctggactcagacggatccttcttcctctactcgcggctgaccgtggataagagcagatggcaggagggaaatgtgttcagctgttctgtgatgcatgaagccctgcacaaccactacactcagaagtccctgtccctctccctggga

SEQ ID NO: 3168 - protein, 15 aa, Artificial Sequence
  source: /note="Description of Artificial Sequence: Synthetic peptide"
RASESVEYYGTSLMQ

SEQ ID NO: 3169 - protein, 7 aa, Artificial Sequence
  source: /note="Description of Artificial Sequence: Synthetic peptide"
AASNVES

SEQ ID NO: 3170 - protein, 9 aa, Artificial Sequence
  source: /note="Description of Artificial Sequence: Synthetic peptide"
QQSRKDPST

SEQ ID NO: 3171 - protein, 11 aa, Artificial Sequence
  source: /note="Description of Artificial Sequence: Synthetic peptide"
SESVEYYGTSL

SEQ ID NO: 3172 - protein, 3 aa, Artificial Sequence
  source: /note="Description of Artificial Sequence: Synthetic peptide"
AAS

SEQ ID NO: 3173 - protein, 6 aa, Artificial Sequence
  source: /note="Description of Artificial Sequence: Synthetic peptide"
SRKDPS

SEQ ID NO: 3174 - protein, 111 aa, Artificial Sequence
  source: /note="Description of Artificial Sequence: Synthetic polypeptide"
AIQLTQSPSSLSASVGDRVTITCRASESVEYYGTSLMQWYQQKPGKAPKLLIYAASNVESGVPSRFSGSGSGTDFTLTISSLQPEDFATYFCQQSRKDPSTFGGGTKVEIK

SEQ ID NO: 3175 - DNA, 333 bp, Artificial Sequence
  source: /note="Description of Artificial Sequence: Synthetic polynucleotide"
gctattcagctgactcagtcacctagtagcctgagcgctagtgtgggcgatagagtgactatcacctgtagagctagtgaatcagtcgagtactacggcactagcctgatgcagtggtatcagcagaagcccgggaaagcccctaagctgctgatctacgccgcctctaacgtggaatcaggcgtgccctctaggtttagcggtagcggtagtggcaccgacttcaccctgactatctctagcctgcagcccgaggacttcgctacctacttctgtcagcagtctaggaaggaccctagcaccttcggcggaggcactaaggtcgagattaag

SEQ ID NO: 3176 - protein, 218 aa, Artificial Sequence
  source: /note="Description of Artificial Sequence: Synthetic polypeptide"
AIQLTQSPSSLSASVGDRVTITCRASESVEYYGTSLMQWYQQKPGKAPKLLIYAASNVESGVPSRFSGSGSGTDFTLTISSLQPEDFATYFCQQSRKDPSTFGGGTKVEIKRTVAAPSVFIFPPSDEQLKSGTASVVCLLNNFYPREAKVQWKVDNALQSGNSQESVTEQDSKDSTYSLSSTLTLSKADYEKHKVYACEVTHQGLSSPVTKSFNRGEC

SEQ ID NO: 3177 - DNA, 654 bp, Artificial Sequence
  source: /note="Description of Artificial Sequence: Synthetic polynucleotide"
gctattcagctgactcagtcacctagtagcctgagcgctagtgtgggcgatagagtgactatcacctgtagagctagtgaatcagtcgagtactacggcactagcctgatgcagtggtatcagcagaagcccgggaaagcccctaagctgctgatctacgccgcctctaacgtggaatcaggcgtgccctctaggtttagcggtagcggtagtggcaccgacttcaccctgactatctctagcctgcagcccgaggacttcgctacctacttctgtcagcagtctaggaaggaccctagcaccttcggcggaggcactaaggtcgagattaagcgtacggtggccgctcccagcgtgttcatcttcccccccagcgacgagcagctgaagagcggcaccgccagcgtggtgtgcctgctgaacaacttctacccccgggaggccaaggtgcagtggaaggtggacaacgccctgcagagcggcaacagccaggagagcgtcaccgagcaggacagcaaggactccacctacagcctgagcagcaccctgaccctgagcaaggccgactacgagaagcataaggtgtacgcctgcgaggtgacccaccagggcctgtccagccccgtgaccaagagcttcaacaggggcgagtgc

SEQ ID NO: 3178 - protein, 17 aa, Artificial Sequence
  source: /note="Description of Artificial Sequence: Synthetic peptide"
DIYPGQGDTSYNQKFKG

SEQ ID NO: 3179 - protein, 6 aa, Artificial Sequence
  source: /note="Description of Artificial Sequence: Synthetic peptide"
YPGQGD

SEQ ID NO: 3180 - protein, 118 aa, Artificial Sequence
  source: /note="Description of Artificial Sequence: Synthetic polypeptide"
QVQLVQSGAEVKKPGASVKVSCKASGYTFTSYNMHWVRQAPGQGLEWIGDIYPGQGDTSYNQKFKGRATMTADKSTSTVYMELSSLRSEDTAVYYCARVGGAFPMDYWGQGTLVTVSS

SEQ ID NO: 3181 - DNA, 354 bp, Artificial Sequence
  source: /note="Description of Artificial Sequence: Synthetic polynucleotide"
caggtgcagctggtgcagtcaggcgccgaagtgaagaaacccggcgctagtgtgaaagttagctgtaaagctagtggctatactttcacttcttataatatgcactgggtccgccaggccccaggtcaaggcctcgagtggatcggcgatatctaccccggtcaaggcgacacttcctataatcagaagtttaagggtagagctactatgaccgccgataagtctacttctaccgtctatatggaactgagttccctgaggtctgaggacaccgccgtctactactgcgctagagtgggcggagccttcccaatggactactggggtcaaggcaccctggtcaccgtgtctagc

SEQ ID NO: 3182 - protein, 444 aa, Artificial Sequence
  source: /note="Description of Artificial Sequence: Synthetic polypeptide"
QVQLVQSGAEVKKPGASVKVSCKASGYTFTSYNMHWVRQAPGQGLEWIGDIYPGQGDTSYNQKFKGRATMTADKSTSTVYMELSSLRSEDTAVYYCARVGGAFPMDYWGQGTLVTVSSASTKGPSVFPLAPCSRSTSESTAALGCLVKDYFPEPVTVSWNSGALTSGVHTFPAVLQSSGLYSLSSVVTVPSSSLGTKTYTCNVDHKPSNTKVDKRVESKYGPPCPPCPAPEFLGGPSVFLFPPKPKDTLMISRTPEVTCVVVDVSQEDPEVQFNWYVDGVEVHNAKTKPREEQFNSTYRVVSVLTVLHQDWLNGKEYKCKVSNKGLPSSIEKTISKAKGQPREPQVYTLPPSQEEMTKNQVSLTCLVKGFYPSDIAVEWESNGQPENNYKTTPPVLDSDGSFFLYSRLTVDKSRWQEGNVFSCSVMHEALHNHYTQKSLSLSLG

SEQ ID NO: 3183 - DNA, 1332 bp, Artificial Sequence
  source: /note="Description of Artificial Sequence: Synthetic polynucleotide"
caggtgcagctggtgcagtcaggcgccgaagtgaagaaacccggcgctagtgtgaaagttagctgtaaagctagtggctatactttcacttcttataatatgcactgggtccgccaggccccaggtcaaggcctcgagtggatcggcgatatctaccccggtcaaggcgacacttcctataatcagaagtttaagggtagagctactatgaccgccgataagtctacttctaccgtctatatggaactgagttccctgaggtctgaggacaccgccgtctactactgcgctagagtgggcggagccttcccaatggactactggggtcaaggcaccctggtcaccgtgtctagcgctagcactaagggcccgtccgtgttccccctggcaccttgtagccggagcactagcgaatccaccgctgccctcggctgcctggtcaaggattacttcccggagcccgtgaccgtgtcctggaacagcggagccctgacctccggagtgcacaccttccccgctgtgctgcagagctccgggctgtactcgctgtcgtcggtggtcacggtgccttcatctagcctgggtaccaagacctacacttgcaacgtggaccacaagccttccaacactaaggtggacaagcgcgtcgaatcgaagtacggcccaccgtgcccgccttgtcccgcgccggagttcctcggcggtccctcggtctttctgttcccaccgaagcccaaggacactttgatgatttcccgcacccctgaagtgacatgcgtggtcgtggacgtgtcacaggaagatccggaggtgcagttcaattggtacgtggatggcgtcgaggtgcacaacgccaaaaccaagccgagggaggagcagttcaactccacttaccgcgtcgtgtccgtgctgacggtgctgcatcaggactggctgaacgggaaggagtacaagtgcaaagtgtccaacaagggacttcctagctcaatcgaaaagaccatctcgaaagccaagggacagccccgggaaccccaagtgtataccctgccaccgagccaggaagaaatgactaagaaccaagtctcattgacttgccttgtgaagggcttctacccatcggatatcgccgtggaatgggagtccaacggccagccggaaaacaactacaagaccacccctccggtgctggactcagacggatccttcttcctctactcgcggctgaccgtggataagagcagatggcaggagggaaatgtgttcagctgttctgtgatgcatgaagccctgcacaaccactacactcagaagtccctgtccctctccctggga

SEQ ID NO: 3184 - protein, 111 aa, Artificial Sequence
  source: /note="Description of Artificial Sequence: Synthetic polypeptide"
DIVLTQSPDSLAVSLGERATINCRASESVEYYGTSLMQWYQQKPGQPPKLLIYAASNVESGVPDRFSGSGSGTDFTLTISSLQAEDVAVYYCQQSRKDPSTFGGGTKVEIK

SEQ ID NO: 3185 - DNA, 333 bp, Artificial Sequence
  source: /note="Description of Artificial Sequence: Synthetic polynucleotide"
gatatcgtcctgactcagtcacccgatagcctggccgtcagcctgggcgagcgggctactattaactgtagagctagtgaatcagtcgagtactacggcactagcctgatgcagtggtatcagcagaagcccggtcaaccccctaagctgctgatctacgccgcctctaacgtggaatcaggcgtgcccgataggtttagcggtagcggtagtggcaccgacttcaccctgactattagtagcctgcaggccgaggacgtggccgtctactactgtcagcagtctaggaaggaccctagcaccttcggcggaggcactaaggtcgagattaag

SEQ ID NO: 3186 - protein, 218 aa, Artificial Sequence
  source: /note="Description of Artificial Sequence: Synthetic polypeptide"
DIVLTQSPDSLAVSLGERATINCRASESVEYYGTSLMQWYQQKPGQPPKLLIYAASNVESGVPDRFSGSGSGTDFTLTISSLQAEDVAVYYCQQSRKDPSTFGGGTKVEIKRTVAAPSVFIFPPSDEQLKSGTASVVCLLNNFYPREAKVQWKVDNALQSGNSQESVTEQDSKDSTYSLSSTLTLSKADYEKHKVYACEVTHQGLSSPVTKSFNRGEC

SEQ ID NO: 3187 - DNA, 654 bp, Artificial Sequence
  source: /note="Description of Artificial Sequence: Synthetic polynucleotide"
gatatcgtcctgactcagtcacccgatagcctggccgtcagcctgggcgagcgggctactattaactgtagagctagtgaatcagtcgagtactacggcactagcctgatgcagtggtatcagcagaagcccggtcaaccccctaagctgctgatctacgccgcctctaacgtggaatcaggcgtgcccgataggtttagcggtagcggtagtggcaccgacttcaccctgactattagtagcctgcaggccgaggacgtggccgtctactactgtcagcagtctaggaaggaccctagcaccttcggcggaggcactaaggtcgagattaagcgtacggtggccgctcccagcgtgttcatcttcccccccagcgacgagcagctgaagagcggcaccgccagcgtggtgtgcctgctgaacaacttctacccccgggaggccaaggtgcagtggaaggtggacaacgccctgcagagcggcaacagccaggagagcgtcaccgagcaggacagcaaggactccacctacagcctgagcagcaccctgaccctgagcaaggccgactacgagaagcataaggtgtacgcctgcgaggtgacccaccagggcctgtccagccccgtgaccaagagcttcaacaggggcgagtgc

SEQ ID NO: 3188 - protein, 114 aa, Artificial Sequence
  source: /note="Description of Artificial Sequence: Synthetic polypeptide"
EVQLLESGGGLVQPGGSLRLSCAAASGFTFSSYDMSWVRQAPGKGLDWVSTISGGGTYTYYQDSVKGRFTISRDNSKNTLYLQMNSLRAEDTAVYYCASMDYWGQGTTVTVSSA

SEQ ID NO: 3189 - protein, 108 aa, Artificial Sequence
  source: /note="Description of Artificial Sequence: Synthetic polypeptide"
DIQMTQSPSSLSASVGDRVTITCRASQSIRRYLNWYHQKPGKAPKLLIYGASTLQSGVPSRFSGSGSGTDFTLTISSLQPEDFAVYYCQQSHSAPLTFGGGTKVEIKR

SEQ ID NO: 3190 - protein, 120 aa, Artificial Sequence
  source: /note="Description of Artificial Sequence: Synthetic polypeptide"
EVQVLESGGGLVQPGGSLRLYCVASGFTFSGSYAMSWVRQAPGKGLEWVSAISGSGGSTYYADSVKGRFTISRDNSKNTLYLQMNSLRAEDTAVYYCAKKYYVGPADYWGQGTLVTVSSG

SEQ ID NO: 3191 - protein, 113 aa, Artificial Sequence
  source: /note="Description of Artificial Sequence: Synthetic polypeptide"
DIVMTQSPDSLAVSLGERATINCKSSQSVLYSSNNKNYLAWYQHKPGQPPKLLIYWASTRESGVPDRFSGSGSGTDFTLTISSLQAEDVAVYYCQQYYSSPLTFGGGTKIEVK

SEQ ID NO: 3192 - protein, 114 aa, Homo sapiens
NWVNVISDLKKIEDLIQSMHIDATLYTESDVHPSCKVTAMKCFLLELQVISLESGDASIHDTVENLIILANNSLSSNGNVTESGCKECEELEEKNIKEFLQSFVHIVQMFINTS

SEQ ID NO: 3193 - protein, 170 aa, Homo sapiens
ITCPPPMSVEHADIWVKSYSLYSRERYICNSGFKRKAGTSSLTECVLNKATNVAHWTTPSLKCIRDPALVHQRPAPPSTVTTAGVTPQPESLSPSGKEPAASSPSSNNTAATTAAIVPGSQLMPSKSPSTGTTEISSHESSHGTPSQTTAKNWELTASASHQPPGVYPQG

SEQ ID NO: 3194 - protein, 114 aa, Artificial Sequence
  source: /note="Description of Artificial Sequence: Synthetic polypeptide"
NWVNVISDLKKIEDLIQSMHIDATLYTESDVHPSCKVTAMKCFLLELQVISLESGDASIHDTVENLIILANDSLSSNGNVTESGCKECEELEEKNIKEFLQSFVHIVQMFINTS

SEQ ID NO: 3195 - protein, 297 aa, Artificial Sequence
  source: /note="Description of Artificial Sequence: Synthetic polypeptide"
ITCPPPMSVEHADIWVKSYSLYSRERYICNSGFKRKAGTSSLTECVLNKATNVAHWTTPSLKCIREPKSCDKTHTCPPCPAPELLGGPSVFLFPPKPKDTLMISRTPEVTCVVVDVSHEDPEVKFNWYVDGVEVHNAKTKPREEQYNSTYRVVSVLTVLHQDWLNGKEYKCKVSNKALPAPIEKTISKAKGQPREPQVYTLPPSRDELTKNQVSLTCLVKGFYPSDIAVEWESNGQPENNYKTTPPVLDSDGSFFLYSKLTVDKSRWQQGNVFSCSVMHEALHNHYTQKSLSLSPGK

SEQ ID NO: 3196 - protein, 114 aa, Homo sapiens; identical to SEQ ID NO: 3192
  VARIANT (93)..(93): /replace="K"
  SITE (1)..(114): /note="Variant residues given in the sequence have no preference with respect to those in the annotations for variant positions"

SEQ ID NO: 3197 - protein, 77 aa, Homo sapiens
ITCPPPMSVEHADIWVKSYSLYSRERYICNSGFKRKAGTSSLTECVLNKATNVAHWTTPSLKCIRDPALVHQRPAPP

SEQ ID NO: 3198 - protein, 10 aa, Artificial Sequence
  source: /note="Description of Artificial Sequence: Synthetic peptide"
GYTFTTYWMH

SEQ ID NO: 3199 - protein, 10 aa, Artificial Sequence
  source: /note="Description of Artificial Sequence: Synthetic peptide"
GYTFTSYWMY

SEQ ID NO: 3200 - protein, 40 aa, Artificial Sequence
  source: /note="Description of Artificial Sequence: Synthetic polypeptide"
  SITE (1)..(40): /note="This sequence may encompass 1-10 'Gly Gly Gly Ser' repeating units"
GGGSGGGSGGGSGGGSGGGSGGGSGGGSGGGSGGGSGGGS

SEQ ID NO: 3201 - protein, 4 aa, Artificial Sequence
  source: /note="Description of Artificial Sequence: Synthetic peptide"
RGDS

SEQ ID NO: 3202 - protein, 486 aa, Artificial Sequence
  source: /note="Description of Artificial Sequence: Synthetic polypeptide"
MALPVTALLLPLALLLHAARPEIVMTQSPATLSLSPGERATLSCRASQDISKYLNWYQQKPGQAPRLLIYHTSRLHSGIPARFSGSGSGTDYTLTISSLQPEDFAVYFCQQGNTLPYTFGQGTKLEIKGGGGSGGGGSGGGGSQVQLQESGPGLVKPSETLSLTCTVSGVSLPDYGVSWIRQPPGKGLEWIGVIWGSETTYYQSSLKSRVTISKDNSKNQVSLKLSSVTAADTAVYYCAKHYYYGGSYAMDYWGQGTLVTVSSTTTPAPRPPTPAPTIASQPLSLRPEACRPAAGGAVHTRGLDFACDIYIWAPLAGTCGVLLLSLVITLYCKRGRKKLLYIFKQPFMRPVQTTQEEDGCSCRFPEEEEGGCELRVKFSRSADAPAYQQGQNQLYNELNLGRREEYDVLDKRRGRDPEMGGKPRRKNPQEGLYNELQKDKMAEAYSEIGMKGERRRGKGHDGLYQGLSTATKDTYDALHMQALPPR

SEQ ID NO: 3203 - protein, 465 aa, Artificial Sequence
  source: /note="Description of Artificial Sequence: Synthetic polypeptide"
EIVMTQSPATLSLSPGERATLSCRASQDISKYLNWYQQKPGQAPRLLIYHTSRLHSGIPARFSGSGSGTDYTLTISSLQPEDFAVYFCQQGNTLPYTFGQGTKLEIKGGGGSGGGGSGGGGSQVQLQESGPGLVKPSETLSLTCTVSGVSLPDYGVSWIRQPPGKGLEWIGVIWGSETTYYQSSLKSRVTISKDNSKNQVSLKLSSVTAADTAVYYCAKHYYYGGSYAMDYWGQGTLVTVSSTTTPAPRPPTPAPTIASQPLSLRPEACRPAAGGAVHTRGLDFACDIYIWAPLAGTCGVLLLSLVITLYCKRGRKKLLYIFKQPFMRPVQTTQEEDGCSCRFPEEEEGGCELRVKFSRSADAPAYQQGQNQLYNELNLGRREEYDVLDKRRGRDPEMGGKPRRKNPQEGLYNELQKDKMAEAYSEIGMKGERRRGKGHDGLYQGLSTATKDTYDALHMQALPPR

SEQ ID NO: 3204 - protein, 22 aa, Artificial Sequence
  source: /note="Description of Artificial Sequence: Synthetic peptide"
MLLLVTSLLLCELPHPAFLLIP

SEQ ID NO: 3205 - DNA, 66 bp, Artificial Sequence
  source: /note="Description of Artificial Sequence: Synthetic oligonucleotide"
atgcttctcctggtgacaagccttctgctctgtgagttaccacacccagcattcctcctgatccca

SEQ ID NO: 3206 - DNA, 66 bp, Artificial Sequence
  source: /note="Description of Artificial Sequence: Synthetic oligonucleotide"
atgctgctgctggtgaccagcctgctgctgtgcgagctgccccaccccgcctttctgctgatcccc

SEQ ID NO: 3207 - protein, 465 aa, Artificial Sequence
  source: /note="Description of Artificial Sequence: Synthetic polypeptide"
EIVMTQSPATLSLSPGERATLSCRASQDISKYLNWYQQKPGQAPRLLIYHTSRLHSGIPARFSGSGSGTDYTLTISSLQPEDFAVYFCQQGNTLPYTFGQGTKLEIKGGGGSGGGGSGGGGSQVQLQESGPGLVKPSETLSLTCTVSGVSLPDYGVSWIRQPPGKGLEWIGVIWGSETTYYQSSLKSRVTISKDNSKNQVSLKLSSVTAADTAVYYCAKHYYYGGSYAMDYWGQGTLVTVSSTTTPAPRPPTPAPTIASQPLSLRPEACRPAAGGAVHTRGLDFACDIYIWAPLAGTCGVLLLSLVITLYCKRGRKKLLYIFKQPFMRPVQTTQEEDGCSCRFPEEEEGGCELRVKFSRSADAPAYKQGQNQLYNELNLGRREEYDVLDKRRGRDPEMGGKPRRKNPQEGLYNELQKDKMAEAYSEIGMKGERRRGKGHDGLYQGLSTATKDTYDALHMQALPPR

SEQ ID NO: 3208 - DNA, 1395 bp, Artificial Sequence
  source: /note="Description of Artificial Sequence: Synthetic polynucleotide"
gaaattgtgatgacccagtcacccgccactcttagcctttcacccggtgagcgcgcaaccctgtcttgcagagcctcccaagacatctcaaaataccttaattggtatcaacagaagcccggacaggctcctcgccttctgatctaccacaccagccggctccattctggaatccctgccaggttcagcggtagcggatctgggaccgactacaccctcactatcagctcactgcagccagaggacttcgctgtctatttctgtcagcaagggaacaccctgccctacacctttggacagggcaccaagctcgagattaaaggtggaggtggcagcggaggaggtgggtccggcggtggaggaagccaggtccaactccaagaaagcggaccgggtcttgtgaagccatcagaaactctttcactgacttgtactgtgagcggagtgtctctccccgattacggggtgtcttggatcagacagccaccggggaagggtctggaatggattggagtgatttggggctctgagactacttactaccaatcatccctcaagtcacgcgtcaccatctcaaaggacaactctaagaatcaggtgtcactgaaactgtcatctgtgaccgcagccgacaccgccgtgtactattgcgctaagcattactattatggcgggagctacgcaatggattactggggacagggtactctggtcaccgtgtccagcaccactaccccagcaccgaggccacccaccccggctcctaccatcgcctcccagcctctgtccctgcgtccggaggcatgtagacccgcagctggtggggccgtgcatacccggggtcttgacttcgcctgcgatatctacatttgggcccctctggctggtacttgcggggtcctgctgctttcactcgtgatcactctttactgtaagcgcggtcggaagaagctgctgtacatctttaagcaacccttcatgaggcctgtgcagactactcaagaggaggacggctgttcatgccggttcccagaggaggaggaaggcggctgcgaactgcgcgtgaaattcagccgcagcgcagatgctccagcctacaagcaggggcagaaccagctctacaacgaactcaatcttggtcggagagaggagtacgacgtgctggacaagcggagaggacgggacccagaaatgggcgggaagccgcgcagaaagaatccccaagagggcctgtacaacgagctccaaaaggataagatggcagaagcctatagcgagattggtatgaaaggggaacgcagaagaggcaaaggccacgacggactgtaccagggactcagcaccgccaccaaggacacctatgacgctcttcacatgcaggccctgccgcctcgg

SEQ ID NO: 3209 - DNA, 1458 bp, Artificial Sequence
  source: /note="Description of Artificial Sequence: Synthetic polynucleotide"
atggccctccctgtcaccgccctgctgcttccgctggctcttctgctccacgccgctcggcccgaaattgtgatgacccagtcacccgccactcttagcctttcacccggtgagcgcgcaaccctgtcttgcagagcctcccaagacatctcaaaataccttaattggtatcaacagaagcccggacaggctcctcgccttctgatctaccacaccagccggctccattctggaatccctgccaggttcagcggtagcggatctgggaccgactacaccctcactatcagctcactgcagccagaggacttcgctgtctatttctgtcagcaagggaacaccctgccctacacctttggacagggcaccaagctcgagattaaaggtggaggtggcagcggaggaggtgggtccggcggtggaggaagccaggtccaactccaagaaagcggaccgggtcttgtgaagccatcagaaactctttcactgacttgtactgtgagcggagtgtctctccccgattacggggtgtcttggatcagacagccaccggggaagggtctggaatggattggagtgatttggggctcagagactacttactaccaatcatccctcaagtctcgcgtcaccatctcaaaggacaactctaagaatcaggtgtcactgaaactgtcatctgtgaccgcagccgacaccgccgtgtactattgcgctaagcattactattatggcgggagctacgcaatggattactggggacagggtactctggtcaccgtgtccagcaccactaccccagcaccgaggccacccaccccggctcctaccatcgcctcccagcctctgtccctgcgtccggaggcatgtagacccgcagctggtggggccgtgcatacccggggtcttgacttcgcctgcgatatctacatttgggcccctctggctggtacttgcggggtcctgctgctttcactcgtgatcactctttactgtaagcgcggtcggaagaagctgctgtacatctttaagcaacccttcatgaggcctgtgcagactactcaagaggaggacggctgttcatgccggttcccagaggaggaggaaggcggctgcgaactgcgcgtgaaattcagccgcagcgcagatgctccagcctacaagcaggggcagaaccagctctacaacgaactcaatcttggtcggagagaggagtacgacgtgctggacaagcggagaggacgggacccagaaatgggcgggaagccgcgcagaaagaatccccaagagggcctgtacaacgagctccaaaaggataagatggcagaagcctatagcgagattggtatgaaaggggaacgcagaagaggcaaaggccacgacggactgtaccagggactcagcaccgccaccaaggacacctatgacgctcttcacatgcaggccctgccgcctcgg

SEQ ID NO: 3210 - DNA, 1395 bp, Artificial Sequence
  source: /note="Description of Artificial Sequence: Synthetic polynucleotide"
gaaattgtgatgacccagtcacccgccactcttagcctttcacccggtgagcgcgcaaccctgtcttgcagagcctcccaagacatctcaaaataccttaattggtatcaacagaagcccggacaggctcctcgccttctgatctaccacaccagccggctccattctggaatccctgccaggttcagcggtagcggatctgggaccgactacaccctcactatcagctcactgcagccagaggacttcgctgtctatttctgtcagcaagggaacaccctgccctacacctttggacagggcaccaagctcgagattaaaggtggaggtggcagcggaggaggtgggtccggcggtggaggaagccaggtccaactccaagaaagcggaccgggtcttgtgaagccatcagaaactctttcactgacttgtactgtgagcggagtgtctctccccgattacggggtgtcttggatcagacagccaccggggaagggtctggaatggattggagtgatttggggctcagagactacttactaccaatcatccctcaagtctcgcgtcaccatctcaaaggacaactctaagaatcaggtgtcactgaaactgtcatctgtgaccgcagccgacaccgccgtgtactattgcgctaagcattactattatggcgggagctacgcaatggattactggggacagggtactctggtcaccgtgtccagcaccactaccccagcaccgaggccacccaccccggctcctaccatcgcctcccagcctctgtccctgcgtccggaggcatgtagacccgcagctggtggggccgtgcatacccggggtcttgacttcgcctgcgatatctacatttgggcccctctggctggtacttgcggggtcctgctgctttcactcgtgatcactctttactgtaagcgcggtcggaagaagctgctgtacatctttaagcaacccttcatgaggcctgtgcagactactcaagaggaggacggctgttcatgccggttcccagaggaggaggaaggcggctgcgaactgcgcgtgaaattcagccgcagcgcagatgctccagcctacaagcaggggcagaaccagctctacaacgaactcaatcttggtcggagagaggagtacgacgtgctggacaagcggagaggacgggacccagaaatgggcgggaagccgcgcagaaagaatccccaagagggcctgtacaacgagctccaaaaggataagatggcagaagcctatagcgagattggtatgaaaggggaacgcagaagaggcaaaggccacgacggactgtaccagggactcagcaccgccaccaaggacacctatgacgctcttcacatgcaggccctgccgcctcgg

SEQ ID NO: 3211 - DNA, 1458 bp, Artificial Sequence
  source: /note="Description of Artificial Sequence: Synthetic polynucleotide"
atggccctccctgtcaccgccctgctgcttccgctggctcttctgctccacgccgctcggcccgaaattgtgatgacccagtcacccgccactcttagcctttcacccggtgagcgcgcaaccctgtcttgcagagcctcccaagacatctcaaaataccttaattggtatcaacagaagcccggacaggctcctcgccttctgatctaccacaccagccggctccattctggaatccctgccaggttcagcggtagcggatctgggaccgactacaccctcactatcagctcactgcagccagaggacttcgctgtctatttctgtcagcaagggaacaccctgccctacacctttggacagggcaccaagctcgagattaaaggtggaggtggcagcggaggaggtgggtccggcggtggaggaagccaggtccaactccaagaaagcggaccgggtcttgtgaagccatcagaaactctttcactgacttgtactgtgagcggagtgtctctccccgattacggggtgtcttggatcagacagccaccggggaagggtctggaatggattggagtgatttggggctctgagactacttactaccaatcatccctcaagtcacgcgtcaccatctcaaaggacaactctaagaatcaggtgtcactgaaactgtcatctgtgaccgcagccgacaccgccgtgtactattgcgctaagcattactattatggcgggagctacgcaatggattactggggacagggtactctggtcaccgtgtccagcaccactaccccagcaccgaggccacccaccccggctcctaccatcgcctcccagcctctgtccctgcgtccggaggcatgtagacccgcagctggtggggccgtgcatacccggggtcttgacttcgcctgcgatatctacatttgggcccctctggctggtacttgcggggtcctgctgctttcactcgtgatcactctttactgtaagcgcggtcggaagaagctgctgtacatctttaagcaacccttcatgaggcctgtgcagactactcaagaggaggacggctgttcatgccggttcccagaggaggaggaaggcggctgcgaactgcgcgtgaaattcagccgcagcgcagatgctccagcctaccagcaggggcagaaccagctctacaacgaactcaatcttggtcggagagaggagtacgacgtgctggacaagcggagaggacgggacccagaaatgggcgggaagccgcgcagaaagaatccccaagagggcctgtacaacgagctccaaaaggataagatggcagaagcctatagcgagattggtatgaaaggggaacgcagaagaggcaaaggccacgacggactgtaccagggactcagcaccgccaccaaggacacctatgacgctcttcacatgcaggccctgccgcctcgg

SEQ ID NO: 3212 - DNA, 1395 bp, Artificial Sequence
  source: /note="Description of Artificial Sequence: Synthetic polynucleotide"
gaaattgtgatgacccagtcacccgccactcttagcctttcacccggtgagcgcgcaaccctgtcttgcagagcctcccaagacatctcaaaataccttaattggtatcaacagaagcccggacaggctcctcgccttctgatctaccacaccagccggctccattctggaatccctgccaggttcagcggtagcggatctgggaccgactacaccctcactatcagctcactgcagccagaggacttcgctgtctatttctgtcagcaagggaacaccctgccctacacctttggacagggcaccaagctcgagattaaaggtggaggtggcagcggaggaggtgggtccggcggtggaggaagccaggtccaactccaagaaagcggaccgggtcttgtgaagccatcagaaactctttcactgacttgtactgtgagcggagtgtctctccccgattacggggtgtcttggatcagacagccaccggggaagggtctggaatggattggagtgatttggggctctgagactacttactaccaatcatccctcaagtcacgcgtcaccatctcaaaggacaactctaagaatcaggtgtcactgaaactgtcatctgtgaccgcagccgacaccgccgtgtactattgcgctaagcattactattatggcgggagctacgcaatggattactggggacagggtactctggtcaccgtgtccagcaccactaccccagcaccgaggccacccaccccggctcctaccatcgcctcccagcctctgtccctgcgtccggaggcatgtagacccgcagctggtggggccgtgcatacccggggtcttgacttcgcctgcgatatctacatttgggcccctctggctggtacttgcggggtcctgctgctttcactcgtgatcactctttactgtaagcgcggtcggaagaagctgctgtacatctttaagcaacccttcatgaggcctgtgcagactactcaagaggaggacggctgttcatgccggttcccagaggaggaggaaggcggctgcgaactgcgcgtgaaattcagccgcagcgcagatgctccagcctaccagcaggggcagaaccagctctacaacgaactcaatcttggtcggagagaggagtacgacgtgctggacaagcggagaggacgggacccagaaatgggcgggaagccgcgcagaaagaatccccaagagggcctgtacaacgagctccaaaaggataagatggcagaagcctatagcgagattggtatgaaaggggaacgcagaagaggcaaaggccacgacggactgtaccagggactcagcaccgccaccaaggacacctatgacgctcttcacatgcaggccctgccgcctcgg

SEQ ID NO: 3213 - DNA, 1458 bp, Artificial Sequence
  source: /note="Description of Artificial Sequence: Synthetic polynucleotide"
atggccctccctgtcaccgccctgctgcttccgctggctcttctgctccacgccgctcggcccgaaattgtgatgacccagtcacccgccactcttagcctttcacccggtgagcgcgcaaccctgtcttgcagagcctcccaagacatctcaaaataccttaattggtatcaacagaagcccggacaggctcctcgccttctgatctaccacaccagccggctccattctggaatccctgccaggttcagcggtagcggatctgggaccgactacaccctcactatcagctcactgcagccagaggacttcgctgtctatttctgtcagcaagggaacaccctgccctacacctttggacagggcaccaagctcgagattaaaggtggaggtggcagcggaggaggtgggtccggcggtggaggaagccaggtccaactccaagaaagcggaccgggtcttgtgaagccatcagaaactctttcactgacttgtactgtgagcggagtgtctctccccgattacggggtgtcttggatcagacagccaccggggaagggtctggaatggattggagtgatttggggctcagagactacttactaccaatcatccctcaagtctcgcgtcaccatctcaaaggacaactctaagaatcaggtgtcactgaaactgtcatctgtgaccgcagccgacaccgccgtgtactattgcgctaagcattactattatggcgggagctacgcaatggattactggggacagggtactctggtcaccgtgtccagcaccactaccccagcaccgaggccacccaccccggctcctaccatcgcctcccagcctctgtccctgcgtccggaggcatgtagacccgcagctggtggggccgtgcatacccggggtcttgacttcgcctgcgatatctacatttgggcccctctggctggtacttgcggggtcctgctgctttcactcgtgatcactctttactgtaagcgcggtcggaagaagctgctgtacatctttaagcaacccttcatgaggcctgtgcagactactcaagaggaggacggctgttcatgccggttcccagaggaggaggaaggcggctgcgaactgcgcgtgaaattcagccgcagcgcagatgctccagcctaccagcaggggcagaaccagctctacaacgaactcaatcttggtcggagagaggagtacgacgtgctggacaagcggagaggacgggacccagaaatgggcgggaagccgcgcagaaagaatccccaagagggcctgtacaacgagctccaaaaggataagatggcagaagcctatagcgagattggtatgaaaggggaacgcagaagaggcaaaggccacgacggactgtaccagggactcagcaccgccaccaaggacacctatgacgctcttcacatgcaggccctgccgcctcgg

SEQ ID NO: 3214 - DNA, 1395 bp, Artificial Sequence
  source: /note="Description of Artificial Sequence: Synthetic polynucleotide"
gaaattgtgatgacccagtcacccgccactcttagcctttcacccggtgagcgcgcaaccctgtcttgcagagcctcccaagacatctcaaaataccttaattggtatcaacagaagcccggacaggctcctcgccttctgatctaccacaccagccggctccattctggaatccctgccaggttcagcggtagcggatctgggaccgactacaccctcactatcagctcactgcagccagaggacttcgctgtctatttctgtcagcaagggaacaccctgccctacacctttggacagggcaccaagctcgagattaaaggtggaggtggcagcggaggaggtgggtccggcggtggaggaagccaggtccaactccaagaaagcggaccgggtcttgtgaagccatcagaaactctttcactgacttgtactgtgagcggagtgtctctccccgattacggggtgtcttggatcagacagccaccggggaagggtctggaatggattggagtgatttggggctcagagactacttactaccaatcatccctcaagtctcgcgtcaccatctcaaaggacaactctaagaatcaggtgtcactgaaactgtcatctgtgaccgcagccgacaccgccgtgtactattgcgctaagcattactattatggcgggagctacgcaatggattactggggacagggtactctggtcaccgtgtccagcaccactaccccagcaccgaggccacccaccccggctcctaccatcgcctcccagcctctgtccctgcgtccggaggcatgtagacccgcagctggtggggccgtgcatacccggggtcttgacttcgcctgcgatatctacatttgggcccctctggctggtacttgcggggtcctgctgctttcactcgtgatcactctttactgtaagcgcggtcggaagaagctgctgtacatctttaagcaacccttcatgaggcctgtgcagactactcaagaggaggacggctgttcatgccggttcccagaggaggaggaaggcggctgcgaactgcgcgtgaaattcagccgcagcgcagatgctccagcctaccagcaggggcagaaccagctctacaacgaactcaatcttggtcggagagaggagtacgacgtgctggacaagcggagaggacgggacccagaaatgggcgggaagccgcgcagaaagaatccccaagagggcctgtacaacgagctccaaaaggataagatggcagaagcctatagcgagattggtatgaaaggggaacgcagaagaggcaaaggccacgacggactgtaccagggactcagcaccgccaccaaggacacctatgacgctcttcacatgcaggccctgccgcctcgg

SEQ ID NO: 3215 - DNA, 1467 bp, Artificial Sequence
  source: /note="Description of Artificial Sequence: Synthetic polynucleotide"
atgcttctcctggtgacaagccttctgctctgtgagttaccacacccagcattcctcctgatcccagacatccagatgacacagactacatcctccctgtctgcctctctgggagacagagtcaccatcagttgcagggcaagtcaggacattagtaaatatttaaattggtatcagcagaaaccagatggaactgttaaactcctgatctaccatacatcaagattacactcaggagtcccatcaaggttcagtggcagtgggtctggaacagattattctctcaccattagcaacctggagcaagaagatattgccacttacttttgccaacagggtaatacgcttccgtacacgttcggaggggggactaagttggaaataacaggctccacctctggatccggcaagcccggatctggcgagggatccaccaagggcgaggtgaaactgcaggagtcaggacctggcctggtggcgccctcacagagcctgtccgtcacatgcactgtctcaggggtctcattacccgactatggtgtaagctggattcgccagcctccacgaaagggtctggagtggctgggagtaatatggggtagtgaaaccacatactataattcagctctcaaatccagactgaccatcatcaaggacaactccaagagccaagttttcttaaaaatgaacagtctgcaaactgatgacacagccatttactactgtgccaaacattattactacggtggtagctatgctatggactactggggtcaaggaacctcagtcaccgtctcctcagcggccgcaattgaagttatgtatcctcctccttacctagacaatgagaagagcaatggaaccattatccatgtgaaagggaaacacctttgtccaagtcccctatttcccggaccttctaagcccttttgggtgctggtggtggttgggggagtcctggcttgctatagcttgctagtaacagtggcctttattattttctgggtgaggagtaagaggagcaggctcctgcacagtgactacatgaacatgactccccgccgccccgggcccacccgcaagcattaccagccctatgccccaccacgcgacttcgcagcctatcgctccagagtgaagttcagcaggagcgcagacgcccccgcgtaccagcagggccagaaccagctctataacgagctcaatctaggacgaagagaggagtacgatgttttggacaagagacgtggccgggaccctgagatggggggaaagccgagaaggaagaaccctcaggaaggcctgtacaatgaactgcagaaagataagatggcggaggcctacagtgagattgggatgaaaggcgagcgccggaggggcaaggggcacgatggcctttaccagggtctcagtacagccaccaaggacacctacgacgcccttcacatgcaggccctgccccctcgc

SEQ ID NO: 3216 - protein, 489 aa, Artificial Sequence
  source: /note="Description of Artificial Sequence: Synthetic polypeptide"
MLLLVTSLLLCELPHPAFLLIPDIQMTQTTSSLSASLGDRVTISCRASQDISKYLNWYQQKPDGTVKLLIYHTSRLHSGVPSRFSGSGSGTDYSLTISNLEQEDIATYFCQQGNTLPYTFGGGTKLEITGSTSGSGKPGSGEGSTKGEVKLQESGPGLVAPSQSLSVTCTVSGVSLPDYGVSWIRQPPRKGLEWLGVIWGSETTYYNSALKSRLTIIKDNSKSQVFLKMNSLQTDDTAIYYCAKHYYYGGSYAMDYWGQGTSVTVSSAAAIEVMYPPPYLDNEKSNGTIIHVKGKHLCPSPLFPGPSKPFWVLVVVGGVLACYSLLVTVAFIIFWVRSKRSRLLHSDYMNMTPRRPGPTRKHYQPYAPPRDFAAYRSRVKFSRSADAPAYQQGQNQLYNELNLGRREEYDVLDKRRGRDPEMGGKPRRKNPQEGLYNELQKDKMAEAYSEIGMKGERRRGKGHDGLYQGLSTATKDTYDALHMQALPPR

SEQ ID NO: 3217 - DNA, 801 bp, Artificial Sequence
  source: /note="Description of Artificial Sequence: Synthetic polynucleotide"
atgcttctcctggtgacaagccttctgctctgtgagttaccacacccagcattcctcctgatcccagacatccagatgacacagactacatcctccctgtctgcctctctgggagacagagtcaccatcagttgcagggcaagtcaggacattagtaaatatttaaattggtatcagcagaaaccagatggaactgttaaactcctgatctaccatacatcaagattacactcaggagtcccatcaaggttcagtggcagtgggtctggaacagattattctctcaccattagcaacctggagcaagaagatattgccacttacttttgccaacagggtaatacgcttccgtacacgttcggaggggggactaagttggaaataacaggctccacctctggatccggcaagcccggatctggcgagggatccaccaagggcgaggtgaaactgcaggagtcaggacctggcctggtggcgccctcacagagcctgtccgtcacatgcactgtctcaggggtctcattacccgactatggtgtaagctggattcgccagcctccacgaaagggtctggagtggctgggagtaatatggggtagtgaaaccacatactataattcagctctcaaatccagactgaccatcatcaaggacaactccaagagccaagttttcttaaaaatgaacagtctgcaaactgatgacacagccatttactactgtgccaaacattattactacggtggtagctatgctatggactactggggtcaaggaacctcagtcaccgtctcctca

SEQ ID NO: 3218 - protein, 266 aa, Artificial Sequence
  source: /note="Description of Artificial Sequence: Synthetic polypeptide"
MLLLVTSLLLCELPHPAFLLIPDIQMTQTTSSLSASLGDRVTISCRASQDISKYLNWYQQKPDGTVKLLIYHTSRLHSGVPSRFSGSGSGTDYSLTISNLEQEDIATYFCQQGNTLPYTFGGGTKLEITGSTSGSGKPGSGEGSTKGEVKLQESGPGLVAPSQSLSVTCTVSGVSLPDYGVSWIRQPPRKGLEWLGVIWGSETTYYNSALKSRLTIIKDNSKSQVFLKMNSLQTDDTAIYYCAKHYYYGGSYAMDYWGQGTSVTVS

SEQ ID NO: 3219 - DNA, 1401 bp, Artificial Sequence
  source: /note="Description of Artificial Sequence: Synthetic polynucleotide"
gacatccagatgacacagactacatcctccctgtctgcctctctgggagacagagtcaccatcagttgcagggcaagtcaggacattagtaaatatttaaattggtatcagcagaaaccagatggaactgttaaactcctgatctaccatacatcaagattacactcaggagtcccatcaaggttcagtggcagtgggtctggaacagattattctctcaccattagcaacctggagcaagaagatattgccacttacttttgccaacagggtaatacgcttccgtacacgttcggaggggggactaagttggaaataacaggctccacctctggatccggcaagcccggatctggcgagggatccaccaagggcgaggtgaaactgcaggagtcaggacctggcctggtggcgccctcacagagcctgtccgtcacatgcactgtctcaggggtctcattacccgactatggtgtaagctggattcgccagcctccacgaaagggtctggagtggctgggagtaatatggggtagtgaaaccacatactataattcagctctcaaatccagactgaccatcatcaaggacaactccaagagccaagttttcttaaaaatgaacagtctgcaaactgatgacacagccatttactactgtgccaaacattattactacggtggtagctatgctatggactactggggtcaaggaacctcagtcaccgtctcctcagcggccgcaattgaagttatgtatcctcctccttacctagacaatgagaagagcaatggaaccattatccatgtgaaagggaaacacctttgtccaagtcccctatttcccggaccttctaagcccttttgggtgctggtggtggttgggggagtcctggcttgctatagcttgctagtaacagtggcctttattattttctgggtgaggagtaagaggagcaggctcctgcacagtgactacatgaacatgactccccgccgccccgggcccacccgcaagcattaccagccctatgccccaccacgcgacttcgcagcctatcgctccagagtgaagttcagcaggagcgcagacgcccccgcgtaccagcagggccagaaccagctctataacgagctcaatctaggacgaagagaggagtacgatgttttggacaagagacgtggccgggaccctgagatggggggaaagccgagaaggaagaaccctcaggaaggcctgtacaatgaactgcagaaagataagatggcggaggcctacagtgagattgggatgaaaggcgagcgccggaggggcaaggggcacgatggcctttaccagggtctcagtacagccaccaaggacacctacgacgcccttcacatgcaggccctgccccctcgc

SEQ ID NO: 3220 - DNA, 735 bp, Artificial Sequence
  source: /note="Description of Artificial Sequence: Synthetic polynucleotide"
gacatccagatgacacagactacatcctccctgtctgcctctctgggagacagagtcaccatcagttgcagggcaagtcaggacattagtaaatatttaaattggtatcagcagaaaccagatggaactgttaaactcctgatctaccatacatcaagattacactcaggagtcccatcaaggttcagtggcagtgggtctggaacagattattctctcaccattagcaacctggagcaagaagatattgccacttacttttgccaacagggtaatacgcttccgtacacgttcggaggggggactaagttggaaataacaggctccacctctggatccggcaagcccggatctggcgagggatccaccaagggcgaggtgaaactgcaggagtcaggacctggcctggtggcgccctcacagagcctgtccgtcacatgcactgtctcaggggtctcattacccgactatggtgtaagctggattcgccagcctccacgaaagggtctggagtggctgggagtaatatggggtagtgaaaccacatactataattcagctctcaaatccagactgaccatcatcaaggacaactccaagagccaagttttcttaaaaatgaacagtctgcaaactgatgacacagccatttactactgtgccaaacattattactacggtggtagctatgctatggactactggggtcaaggaacctcagtcaccgtctcctca

SEQ ID NO: 3221 - DNA, 1383 bp, Artificial Sequence
  source: /note="Description of Artificial Sequence: Synthetic polynucleotide"
atgctgctgctggtgaccagcctgctgctgtgcgagctgccccaccccgcctttctgctgatccccgacatccagatgacccagaccacctccagcctgagcgccagcctgggcgaccgggtgaccatcagctgccgggccagccaggacatcagcaagtacctgaactggtatcagcagaagcccgacggcaccgtcaagctgctgatctaccacaccagccggctgcacagcggcgtgcccagccggtttagcggcagcggctccggcaccgactacagcctgaccatctccaacctggaacaggaagatatcgccacctacttttgccagcagggcaacacactgccctacacctttggcggcggaacaaagctggaaatcaccggcagcacctccggcagcggcaagcctggcagcggcgagggcagcaccaagggcgaggtgaagctgcaggaaagcggccctggcctggtggcccccagccagagcctgagcgtgacctgcaccgtgagcggcgtgagcctgcccgactacggcgtgagctggatccggcagccccccaggaagggcctggaatggctgggcgtgatctggggcagcgagaccacctactacaacagcgccctgaagagccggctgaccatcatcaaggacaacagcaagagccaggtgttcctgaagatgaacagcctgcagaccgacgacaccgccatctactactgcgccaagcactactactacggcggcagctacgccatggactactggggccagggcaccagcgtgaccgtgagcagcgaatctaagtacggaccgccctgccccccttgccctatgttctgggtgctggtggtggtcggaggcgtgctggcctgctacagcctgctggtcaccgtggccttcatcatcttttgggtgaaacggggcagaaagaaactcctgtatatattcaaacaaccatttatgagaccagtacaaactactcaagaggaagatggctgtagctgccgatttccagaagaagaagaaggaggatgtgaactgcgggtgaagttcagcagaagcgccgacgcccctgcctaccagcagggccagaatcagctgtacaacgagctgaacctgggcagaagggaagagtacgacgtcctggataagcggagaggccgggaccctgagatgggcggcaagcctcggcggaagaacccccaggaaggcctgtataacgaactgcagaaagacaagatggccgaggcctacagcgagatcggcatgaagggcgagcggaggcggggcaagggccacgacggcctgtatcagggcctgtccaccgccaccaaggatacctacgacgccctgcacatgcaggccctgcccccaagg

SEQ ID NO: 3222 - protein, 461 aa, Artificial Sequence
  source: /note="Description of Artificial Sequence: Synthetic polypeptide"
MLLLVTSLLLCELPHPAFLLIPDIQMTQTTSSLSASLGDRVTISCRASQDISKYLNWYQQKPDGTVKLLIYHTSRLHSGVPSRFSGSGSGTDYSLTISNLEQEDIATYFCQQGNTLPYTFGGGTKLEITGSTSGSGKPGSGEGSTKGEVKLQESGPGLVAPSQSLSVTCTVSGVSLPDYGVSWIRQPPRKGLEWLGVIWGSETTYYNSALKSRLTIIKDNSKSQVFLKMNSLQTDDTAIYYCAKHYYYGGSYAMDYWGQGTSVTVSSESKYGPPCPPCPMFWVLVVVGGVLACYSLLVTVAFIIFWVKRGRKKLLYIFKQPFMRPVQTTQEEDGCSCRFPEEEEGGCELRVKFSRSADAPAYQQGQNQLYNELNLGRREEYDVLDKRRGRDPEMGGKPRRKNPQEGLYNELQKDKMAEAYSEIGMKGERRRGKGHDGLYQGLSTATKDTYDALHMQALPPR

SEQ ID NO: 3223 - DNA, 801 bp, Artificial Sequence
  source: /note="Description of Artificial Sequence: Synthetic polynucleotide"
atgctgctgctggtgaccagcctgctgctgtgcgagctgccccaccccgcctttctgctgatccccgacatccagatgacccagaccacctccagcctgagcgccagcctgggcgaccgggtgaccatcagctgccgggccagccaggacatcagcaagtacctgaactggtatcagcagaagcccgacggcaccgtcaagctgctgatctaccacaccagccggctgcacagcggcgtgcccagccggtttagcggcagcggctccggcaccgactacagcctgaccatctccaacctggaacaggaagatatcgccacctacttttgccagcagggcaacacactgccctacacctttggcggcggaacaaagctggaaatcaccggcagcacctccggcagcggcaagcctggcagcggcgagggcagcaccaagggcgaggtgaagctgcaggaaagcggccctggcctggtggcccccagccagagcctgagcgtgacctgcaccgtgagcggcgtgagcctgcccgactacggcgtgagctggatccggcagccccccaggaagggcctggaatggctgggcgtgatctggggcagcgagaccacctactacaacagcgccctgaagagccggctgaccatcatcaaggacaacagcaagagccaggtgttcctgaagatgaacagcctgcagaccgacgacaccgccatctactactgcgccaagcactactactacggcggcagctacgccatggactactggggccagggcaccagcgtgaccgtgagcagc

SEQ ID NO: 3224 - protein, 267 aa, Artificial Sequence
  source: /note="Description of Artificial Sequence: Synthetic polypeptide"
MLLLVTSLLLCELPHPAFLLIPDIQMTQTTSSLSASLGDRVTISCRASQDISKYLNWYQQKPDGTVKLLIYHTSRLHSGVPSRFSGSGSGTDYSLTISNLEQEDIATYFCQQGNTLPYTFGGGTKLEITGSTSGSGKPGSGEGSTKGEVKLQESGPGLVAPSQSLSVTCTVSGVSLPDYGVSWIRQPPRKGLEWLGVIWGSETTYYNSALKSRLTIIKDNSKSQVFLKMNSLQTDDTAIYYCAKHYYYGGSYAMDYWGQGTSVTVSS

SEQ ID NO: 3225 - DNA, 1317 bp, Artificial Sequence
  source: /note="Description of Artificial Sequence: Synthetic polynucleotide"
gacatccagatgacccagaccacctccagcctgagcgccagcctgggcgaccgggtgaccatcagctgccgggccagccaggacatcagcaagtacctgaactggtatcagcagaagcccgacggcaccgtcaagctgctgatctaccacaccagccggctgcacagcggcgtgcccagccggtttagcggcagcggctccggcaccgactacagcctgaccatctccaacctggaacaggaagatatcgccacctacttttgccagcagggcaacacactgccctacacctttggcggcggaacaaagctggaaatcaccggcagcacctccggcagcggcaagcctggcagcggcgagggcagcaccaagggcgaggtgaagctgcaggaaagcggccctggcctggtggcccccagccagagcctgagcgtgacctgcaccgtgagcggcgtgagcctgcccgactacggcgtgagctggatccggcagccccccaggaagggcctggaatggctgggcgtgatctggggcagcgagaccacctactacaacagcgccctgaagagccggctgaccatcatcaaggacaacagcaagagccaggtgttcctgaagatgaacagcctgcagaccgacgacaccgccatctactactgcgccaagcactactactacggcggcagctacgccatggactactggggccagggcaccagcgtgaccgtgagcagcgaatctaagtacggaccgccctgccccccttgccctatgttctgggtgctggtggtggtcggaggcgtgctggcctgctacagcctgctggtcaccgtggccttcatcatcttttgggtgaaacggggcagaaagaaactcctgtatatattcaaacaaccatttatgagaccagtacaaactactcaagaggaagatggctgtagctgccgatttccagaagaagaagaaggaggatgtgaactgcgggtgaagttcagcagaagcgccgacgcccctgcctaccagcagggccagaatcagctgtacaacgagctgaacctgggcagaagggaagagtacgacgtcctggataagcggagaggccgggaccctgagatgggcggcaagcctcggcggaagaacccccaggaaggcctgtataacgaactgcagaaagacaagatggccgaggcctacagcgagatcggcatgaagggcgagcggaggcggggcaagggccacgacggcctgtatcagggcctgtccaccgccaccaaggatacctacgacgccctgcacatgcaggccctgcccccaagg

SEQ ID NO: 3226 - protein, 439 aa, Artificial Sequence
  source: /note="Description of Artificial Sequence: Synthetic polypeptide"
DIQMTQTTSSLSASLGDRVTISCRASQDISKYLNWYQQKPDGTVKLLIYHTSRLHSGVPSRFSGSGSGTDYSLTISNLEQEDIATYFCQQGNTLPYTFGGGTKLEITGSTSGSGKPGSGEGSTKGEVKLQESGPGLVAPSQSLSVTCTVSGVSLPDYGVSWIRQPPRKGLEWLGVIWGSETTYYNSALKSRLTIIKDNSKSQVFLKMNSLQTDDTAIYYCAKHYYYGGSYAMDYWGQGTSVTVSSESKYGPPCPPCPMFWVLVVVGGVLACYSLLVTVAFIIFWVKRGRKKLLYIFKQPFMRPVQTTQEEDGCSCRFPEEEEGGCELRVKFSRSADAPAYQQGQNQLYNELNLGRREEYDVLDKRRGRDPEMGGKPRRKNPQEGLYNELQKDKMAEAYSEIGMKGERRRGKGHDGLYQGLSTATKDTYDALHMQALPPR

SEQ ID NO: 3227 - DNA, 735 bp, Artificial Sequence
  source: /note="Description of Artificial Sequence: Synthetic polynucleotide"
gacatccagatgacccagaccacctccagcctgagcgccagcctgggcgaccgggtgaccatcagctgccgggccagccaggacatcagcaagtacctgaactggtatcagcagaagcccgacggcaccgtcaagctgctgatctaccacaccagccggctgcacagcggcgtgcccagccggtttagcggcagcggctccggcaccgactacagcctgaccatctccaacctggaacaggaagatatcgccacctacttttgccagcagggcaacacactgccctacacctttggcggcggaacaaagctggaaatcaccggcagcacctccggcagcggcaagcctggcagcggcgagggcagcaccaagggcgaggtgaagctgcaggaaagcggccctggcctggtggcccccagccagagcctgagcgtgacctgcaccgtgagcggcgtgagcctgcccgactacggcgtgagctggatccggcagccccccaggaagggcctggaatggctgggcgtgatctggggcagcgagaccacctactacaacagcgccctgaagagccggctgaccatcatcaaggacaacagcaagagccaggtgttcctgaagatgaacagcctgcagaccgacgacaccgccatctactactgcgccaagcactactactacggcggcagctacgccatggactactggggccagggcaccagcgtgaccgtgagcagc

SEQ ID NO: 3228 - protein, 220 aa, Artificial Sequence
  source: /note="Description of Artificial Sequence: Synthetic polypeptide"
EIVLTQSPATLSLSPGERATLSCKSSQSLLDSGNQKNFLTWYQQKPGKAPKLLIYWASTRESGVPSRFSGSGSGTDFTFTISSLQPEDIATYYCQNDYSYPYTFGQGTKVEIKRTVAAPSVFIFPPSDEQLKSGTASVVCLLNNFYPREAKVQWKVDNALQSGNSQESVTEQDSKDSTYSLSSTLTLSKADYEKHKVYACEVTHQGLSSPVTKSFNRGEC
